(19) United States
(12) Patent Application Publication
(10) Pub. No.: US 2024/0067940 A1
(43) Pub. Date: Feb. 29, 2024

(54) METHODS AND COMPOSITIONS FOR EDITING NUCLEOTIDE SEQUENCES

(71) Applicant: Prime Medicine, Inc., Cambridge, MA (US)

(72) Inventors: Christopher WILSON, Waltham, MA (US); Andrew V. ANZALONE, Cambridge, MA (US); Jonathan M. LEVY, Brookline, MA (US)

(21) Appl. No.: 18/478,179

(22) Filed: Sep. 29, 2023

Related U.S. Application Data
(63) Continuation of application No. PCT/US2022/023175, filed on Apr. 1, 2022.
(60) Provisional application No. 63/169,725, filed on Apr. 1, 2021.
(60) Provisional application No. 63/282,945, filed on Nov. 24, 2021.

(51) Int. Cl. C12N 9/12; C12N 9/22; C12N 15/11

(52) U.S. Cl. CPC C12N 9/1252; C12N 9/22; C12N 15/11; C12N 9/1276; C12Y 207/07049; C12Y 207/07007; C12N 2310/20; C12N 2800/80

(57) ABSTRACT

Disclosed herein, are prime editors for prime editing. Also disclosed are engineered reverse transcriptases and methods of using same for prime editing.

### CROSS-REFERENCE

[0001] This application is a continuation of International Application No. PCT/US2022/023175, filed Apr. 1, 2022, which claims the benefit of U.S. Provisional Application No. 63/169,725, filed Apr. 1, 2021; and U.S. Provisional Application No. 63/282,945, filed Nov. 24, 2021, each of which applications are incorporated herein by reference in their entirety.

### SEQUENCE LISTING

[0002] The instant application contains a Sequence Listing which has been submitted electronically in XML format and is hereby incorporated by reference in its entirety. Said XML copy, created on Sep. 28, 2023, is named 59761-719301-SL.xml and is 112,129 bytes in size.

### BACKGROUND OF THE DISCLOSURE

[0003] Modern therapeutic manipulations or biotechnological development entails effective genome editing. An effective genome editing technique needs to be accurate, capable of delivering a desired nucleotide change at a chosen genome location without undesirable changes at locations other than the chosen genome location. An effective genome editing technique also needs to be customable; modulable; and programmable, suitable of making any genome changes in any cells or organisms. Furthermore, an effective genome editing technique needs to scalable and reliable, proficient in making any genome changes reproducibly in a robust scale.

### INCORPORATION BY REFERENCE

[0004] All publications, patents, and patent applications mentioned in this specification are herein incorporated by reference to the same extent as if each individual publication, patent, or patent application was specifically and individually indicated to be incorporated by reference. Absent any indication otherwise, publications, patents, and patent applications mentioned in this specification are incorporated herein by reference in their entireties.

### SUMMARY OF THE DISCLOSURE

[0005] In some embodiments, the present disclosure provides a prime editing composition that comprises a) a DNA binding domain or a polynucleotide encoding the DNA binding domain; and b) a DNA polymerase domain or a polynucleotide encoding the DNA polymerase domain, wherein the DNA polymerase domain comprises an amino acid sequence with at least 85% sequence identity to a sequence selected from the group consisting of SEQ ID NOs: 5, 6, 13, 15, 16, 17, 18, 21, 22, 130, 131, 204, 230, 232-244, 249-257, 261, 270, 271, 327, 329, 332, 333, 337, 340, 341, 342, 344, 489, 990-1006, 209, 210, 231, and 229. In some embodiments, wherein the DNA polymerase domain comprises an amino acid sequence with at least 85% sequence identity to any one of sequences set forth in SEQ ID NOs: 209, 210, 229-244, 249-257, 261, 270, 271, 329, 990-1006.

[0006] In some embodiments, wherein the amino acid sequence of the DNA polymerase domain has at least about 86%, 87%, 88%, 80%, 90%, 91%, 92%, 93%, 94%, 95%, 96%, 97%, 98%, 99%, or 100% sequence identity to the selected sequence. In some embodiments, the selected sequence is SEQ ID NO: 261. In some embodiments, the selected sequence for the DNA polymerase domain is SEQ ID NO:270. In some embodiments, the selected sequence for the DNA polymerase domain is SEQ ID NO:16. In some embodiments, the selected sequence for the DNA polymerase domain is SEQ ID NO:18. In some embodiments, the DNA binding domain comprises a CRISPR associated (Cas) protein. In some embodiments, the Cas protein is a Type II Cas protein. In some embodiments, the Cas protein is a Cas9 protein. In some embodiments, the Cas9 protein is a nickase. In some embodiments, the Cas9 protein comprises a mutation in a HNH domain. In some embodiments, the Cas protein is a Type V Cas protein.

[0007] In some embodiments, the Cas protein is a Cas12a, Cas12b, Cas12c, Cas12d, or Cas12e. In some embodiments, the Cas protein is a Cas12b. In some embodiments, the DNA binding domain comprises an amino acid sequence with at least 85% sequence identity to a sequence selected from the group consisting of SEQ ID NOs: 138-146, 494, 858, 1100, 495-503, 1011, 1013. In some embodiments, the amino acid sequence of the DNA binding domain has at least about 86%, 87%, 88%, 80%, 90%, 91%, 92%, 93%, 94%, 95%, 96%, 97%, 98%, 99%, or 100% sequence identity to the selected sequence. In some embodiments, the selected sequence for the DNA binding domain is SEQ ID NOs: 495-503, 1011, 1013, or 1100. In some embodiments, the selected sequence for the DNA binding domain is SEQ ID NOs: 495. In some embodiments, the selected sequence for the DNA binding domain is SEQ ID NOs: 496. In some embodiments, the selected sequence for the DNA binding domain is SEQ ID NOs: 501. In some embodiments, the selected sequence for the DNA binding domain is SEQ ID NO: 502. In some embodiments, the DNA binding domain is connected to the DNA polymerase domain by a linker. In some embodiments, the DNA binding domain is connected to the DNA polymerase domain by a peptide linker in a fusion protein. In some embodiments, the peptide linker comprises a sequence selected from the group consisting of SEQ ID NOs: 272-318, 1014. In some embodiments, the fusion protein comprises the DNA polymerase and the DNA binding domain from N-terminus to C-Terminus. In some embodiments, the fusion protein comprises the DNA binding and the DNA polymerase domain from N-terminus to C-Terminus. In some embodiments, the DNA polymerase domain, the DNA binding domain, or both comprise one or more nuclear localization signals. In some embodiments, the primer editing composition further comprises a solubility-enhancement (SET) domain. In some embodiments, the SET domain comprises an amino acids sequence selected from the group consisting of SEQ ID NOs: 96-124, 137. In some embodiments, the sequence identities are determined by Needleman-Wunsch alignment of two protein sequences with Gap Costs set to Existence: 11 Extension: 1 where percent identity is calculated by dividing the number of identities by the length of the alignment.

[0008] In some embodiments, the present disclosure provides a prime editing composition that comprises a fusion protein, or a polynucleotide encoding the fusion protein, wherein the fusion protein comprises a DNA binding domain and a DNA polymerization domain connected via a peptide linker, wherein the peptide linker comprises an amino acid sequence with at least 80% sequence identity to a sequence selected from the group consisting of SEQ ID NO: 273-318. In some embodiments, the amino acid sequence of the peptide linker has at least about 81%, 82%, 83%, 84%, 85%, 86%, 87%, 88%, 80%, 90%, 91%, 92%, 93%, 94%, 95%, 96%, 97%, 98%, 99%, or 100% sequence identity to the selected sequence. In some embodiments, the DNA polymerase domain comprises an amino acid sequence with at least 85% sequence identity to SEQ ID NO:856 or SEQ ID NO: 884. In some embodiments, the amino acid sequence of the DNA polymerase domain has at least about 86%, 87%, 88%, 80%, 90%, 91%, 92%, 93%, 94%, 95%, 96%, 97%, 98%, 99%, or 100% sequence identity to SEQ ID NO: 856. In some embodiments, the Cas protein is a Type II Cas protein.

[0009] In some embodiments, the Cas protein is a Cas9 protein. In some embodiments, the Cas9 protein is a nickase.

[0010] In some embodiments, the Cas9 protein comprises a mutation in a HNH domain. In some embodiments, the Cas protein is a Type V Cas protein. In some embodiments, the Cas protein is a Cas12a, Cas12b, Cas12c, Cas12d, or Cas12e. In some embodiments, the Cas protein is a Cas12b. In some embodiments, the DNA binding domain comprises an amino acid sequence with at least 85% sequence identity to a sequence selected from the group consisting of SEQ ID NOs: 138-146, 494, 858, 1100, 1011, 1013, 495-503. In some embodiments, the amino acid sequence of the DNA binding domain has at least about 86%, 87%, 88%, 80%, 90%, 91%, 92%, 93%, 94%, 95%, 96%, 97%, 98%, 99%, or 100% sequence identity to the selected sequence.

[0011] In some embodiments, the selected sequence for the DNA binding domain is SEQ ID NOs: 495-503, 1011, 1013, 1100. In some embodiments, the selected sequence for the DNA binding domain is SEQ ID NOs: 495.

[0012] In some embodiments, the selected sequence for the DNA binding domain is SEQ ID NOs: 496. In some embodiments, the selected sequence for the DNA binding domain is SEQ ID NOs: 501. In some embodiments, the selected sequence for the DNA binding domain is SEQ ID NO: 502. In some embodiments, the fusion protein comprises the DNA polymerase and the DNA binding domain from N-terminus to C-Terminus. In some embodiments, the fusion protein comprises the DNA binding and the DNA polymerase domain from N-terminus to C-Terminus. In some embodiments, the DNA polymerase domain, the DNA binding domain, or both comprise one or more nuclear localization signals. In some embodiments, the primer editing composition further comprises a solubility-enhancement (SET) domain. In some embodiments, the SET domain comprises an amino acids sequence selected from the group consisting of SEQ ID NOs: 96-124, 137. In some embodiments, the sequence identities are determined by Needleman-Wunsch alignment of two protein sequences with Gap Costs set to Existence: 11 Extension: 1 where percent identity is calculated by dividing the number of identities by the length of the alignment.

[0013] In some embodiments, the present disclosure provides a prime editing composition that comprises a DNA binding domain, or a polynucleotide encoding the DNA binding domain, wherein the DNA binding domain comprises an amino acid sequence with at least 80% sequence identity to a sequence selected from the group consisting of SEQ ID NOs: 496, 501, 502, 1011, and 1013; and a DNA polymerase domain or a polynucleotide encoding the DNA polymerase domain. In some embodiments, the amino acid sequence of the DNA binding domain has at least about 86%, 87%, 88%, 80%, 90%, 91%, 92%, 93%, 94%, 95%, 96%, 97%, 98%, 99%, or 100% sequence identity to the selected sequence. In some embodiments, the selected sequence for the DNA binding domain is SEQ ID NOs: 496. In some embodiments, the selected sequence for the DNA binding domain is SEQ ID NOs: 501. In some embodiments, the selected sequence for the DNA binding domain is SEQ ID NOs: 502. In some embodiments, the DNA polymerase domain comprises an amino acid sequence with at least 85% sequence identity to SEQ ID NO:856 or SEQ ID NO: 884. In some embodiments, the amino acid sequence of the DNA polymerase domain has at least about 86%, 87%, 88%, 80%, 90%, 91%, 92%, 93%, 94%, 95%, 96%, 97%, 98%, 99%, or 100% sequence identity to SEQ ID NO: 856. In some embodiments, the DNA binding domain is connected to the DNA polymerase domain by a linker. In some embodiments, the DNA binding domain is connected to the DNA polymerase domain by a peptide linker in a fusion protein. In some embodiments, the peptide linker comprises a sequence selected from the group consisting of 272-318, 1014. In some embodiments, the fusion protein comprises the DNA polymerase and the DNA binding domain from N-terminus to C-Terminus. In some embodiments, the fusion protein comprises the DNA binding and the DNA polymerase domain from N-terminus to C-Terminus. In some embodiments, the DNA polymerase domain, the DNA binding domain, or both comprise one or more nuclear localization signals. In some embodiments, the primer editing composition further comprises a solubility-enhancement (SET) domain. In some embodiments, the SET domain comprises an amino acids sequence selected from the group consisting of SEQ ID NOs: 96-124, 137. In some embodiments, the sequence identities are determined by Needleman-Wunsch alignment of two protein sequences with Gap Costs set to Existence: 11 Extension: 1 where percent identity is calculated by dividing the number of identities by the length of the alignment.

[0014] In some embodiments, the present disclosure provides a prime editing composition that comprises a DNA binding domain or a polynucleotide encoding the DNA binding domain; and a DNA polymerase domain, or a polynucleotide encoding the DNA polymerase domain, wherein the DNA polymerase domain comprises an amino acid sequence with at least 85% sequence identity to a sequence selected form the group consisting of SEQ ID NOs: 81, 91, 82, 84. In some embodiments, the amino acid sequence of the DNA polymerase domain has at least about 86%, 87%, 88%, 80%, 90%, 91%, 92%, 93%, 94%, 95%, 96%, 97%, 98%, 99%, or 100% sequence identity to the selected sequence. In some embodiments, the selected sequence for the DNA polymerase domain is SEQ ID NO: 81. In some embodiments, the selected sequence for the DNA polymerase domain is SEQ ID NO: 91. In some embodiments, the selected sequence for the DNA polymerase domain is SEQ ID NO: 82. In some embodiments, the selected sequence for the DNA polymerase domain is SEQ ID NO: 84. In some embodiments, the DNA binding domain comprises a CRISPR associated (Cas) protein.

[0015] In some embodiments, the Cas protein is a Type II Cas protein. In some embodiments, the Cas protein is a Cas9 protein. In some embodiments, the Cas9 protein is a nickase. In some embodiments, the Cas9 protein comprises a mutation in a HNH domain. In some embodiments, the Cas protein is a Type V Cas protein.

[0016] In some embodiments, the Cas protein is a Cas12a, Cas12b, Cas12c, Cas12d, or Cas12e. In some embodiments, the Cas protein is a Cas12b. In some embodiments, the DNA binding domain comprises an amino acid sequence with at least 85% sequence identity to a sequence selected from the group consisting of SEQ ID NOs: 138-146, 494, 858, 1100, 1011, 1013, 495-503. In some embodiments, the amino acid sequence of the DNA binding domain has at least about 86%, 87%, 88%, 80%, 90%, 91%, 92%, 93%, 94%, 95%, 96%, 97%, 98%, 99%, or 100% sequence identity to the selected sequence. In some embodiments, the selected sequence for the DNA binding domain is SEQ ID NOs: 495-503, 1011, 1013, 1100. In some embodiments, the selected sequence for the DNA binding domain is SEQ ID NOs: 495. In some embodiments, the selected sequence for the DNA binding domain is SEQ ID NOs: 496. In some embodiments, the selected sequence for the DNA binding domain is SEQ ID NOs: 501. In some embodiments, the selected sequence for the DNA binding domain is SEQ ID NO:502. In some embodiments, the DNA binding domain is connected to the DNA polymerase domain by a linker. In some embodiments, the DNA binding domain is connected to the DNA polymerase domain by a peptide linker in a fusion protein. In some embodiments, the peptide linker comprises a sequence selected from the group consisting of 272-318, 1014. In some embodiments, the fusion protein comprises the DNA polymerase and the DNA binding domain from N-terminus to C-Terminus. In some embodiments, the fusion protein comprises the DNA binding and the DNA polymerase domain from N-terminus to C-Terminus. In some embodiments, the DNA polymerase domain, the DNA binding domain, or both comprise one or more nuclear localization signals. In some embodiments, the primer editing composition further comprises a solubility-enhancement (SET) domain. In some embodiments, the SET domain comprises an amino acids sequence selected from the group consisting of SEQ ID NOs: 96-124, 137. In some embodiments, the sequence identities are determined by Needleman-Wunsch alignment of two protein sequences with Gap Costs set to Existence: 11 Extension: 1 where percent identity is calculated by dividing the number of identities by the length of the alignment.

[0017] In some embodiments, the present disclosure provides a prime editing composition comprising a DNA binding domain or a polynucleotide encoding the DNA binding domain, and a reverse transcriptase (RT) domain or a polynucleotide encoding the RT domain, wherein the RT domain is from a naturally occurring fusion between a Type III CRISPR system protein and a reverse transcriptase, and wherein the DNA binding domain is heterologous to the RT domain. In some embodiments, the RT domain is from a naturally occurring Cas1-RT fusion protein. In some embodiments, the RT domain comprises an amino acid sequence with at least 85% sequence identity to a sequence selected from the group consisting of SEQ ID NOs: 345, 129-136, 396, 533-846. In some embodiments, the amino acid sequence of the RT domain has at least about 86%, 87%, 88%, 80%, 90%, 91%, 92%, 93%, 94%, 95%, 96%, 97%, 98%, 99%, or 100% sequence identity to the selected sequence. In some embodiments, the selected sequence for the RT domain is SEQ ID NO: 209.

[0018] In some embodiments, the selected sequence for the RT domain is SEQ ID NO: 210. In some embodiments, the RT domain is fused directly to the DNA binding domain. In some embodiments, the RT domain is fused to the N-terminus of the DNA binding domain. In some embodiments, the RT domain is fused to the C-terminus of the DNA binding domain. In some embodiments, the DNA binding domain comprises a CRISPR associated (Cas) protein. In some embodiments, the Cas protein is a Type II Cas protein. In some embodiments, the Cas protein is a Cas9 protein. In some embodiments, the Cas9 protein is a nickase.

[0019] In some embodiments, the Cas9 protein comprises a mutation in a HNH domain. In some embodiments, the Cas protein is a Type V Cas protein. In some embodiments, the Cas protein is a Cas12a, Cas12b, Cas12c, Cas12d, or Cas12e. In some embodiments, the Cas protein is a Cas12b. In some embodiments, the DNA binding domain comprises an amino acid sequence with at least 85% sequence identity to a sequence selected from the group consisting of SEQ ID NOs: 138-146, 494, 858, 1100, 1011, 1013, 495-503. In some embodiments, the amino acid sequence of the DNA binding domain has at least about 86%, 87%, 88%, 80%, 90%, 91%, 92%, 93%, 94%, 95%, 96%, 97%, 98%, 99%, or 100% sequence identity to the selected sequence. In some embodiments, the selected sequence for the DNA binding domain is SEQ ID NOs: 495-503, 1100, 1011, 1013. In some embodiments, the selected sequence for the DNA binding domain is SEQ ID NOs: 1011. In some embodiments, the selected sequence for the DNA binding domain is SEQ ID NOs: 1013

[0020] In some embodiments, the selected sequence for the DNA binding domain is SEQ ID NOs: 496. In some embodiments, the selected sequence for the DNA binding domain is SEQ ID NOs: 501. In some embodiments, the selected sequence for the DNA binding domain is SEQ ID NO: 502. In some embodiments, the RT domain, the DNA binding domain, or both comprise one or more nuclear localization signals. In some embodiments, the primer editing composition further comprises a solubility-enhancement (SET) domain. In some embodiments, the SET domain comprises an amino acids sequence selected from the group consisting of SEQ ID NOs: 96-124, 137. In some embodiments, the sequence identities are determined by Needleman-Wunsch alignment of two protein sequences with Gap Costs set to Existence: 11 Extension: 1 where percent identity is calculated by dividing the number of identities by the length of the alignment.

[0021] In some embodiments, the present disclosure provides a prime editing composition that comprises a DNA polymerase domain or a polynucleotide encoding the DNA polymerase domain, wherein the DNA polymerase domain comprises an amino acid sequence having at least 85% identity to SEQ ID NO: 856 or 884; a DNA binding domain or a polynucleotide encoding the DNA binding domain, wherein the DNA binding domain comprises an amino acid sequence having at least 85% identity to SEQ ID NO: 1011 or 1013; and a solubility-enhancement (SET) domain or a polynucleotide encoding the SET domain, wherein the SET domain comprises an amino acid sequence with at least 80% sequence identity to an amino acid sequence selected from the group consisting of SEQ ID NOs: 96-124, 137. In some embodiments, the amino acid sequence for the SET domain has at least 81%, 82%, 83%, 84%, 85%, 86%, 87%, 88%, 80%, 90%, 91%, 92%, 93%, 94%, 95%, 96%, 97%, 98%, 99%, or 100% sequence identity to the selected sequence. In some embodiments, the selected sequence for the SET domain is SEQ ID NO: 102. In some embodiments, the selected sequence for the SET domain is SEQ ID NO: 137. In some embodiments, the amino acid sequence for the DNA polymerase domain has at least 86%, 87%, 88%, 80%, 90%, 91%, 92%, 93%, 94%, 95%, 96%, 97%, 98%, 99%, or 100% sequence identity to the selected sequence. In some embodiments, the selected sequence for the DNA polymerase domain is 856. In some embodiments, the selected sequence for the DNA polymerase domain is 884. In some embodiments, the amino acid sequence for the DNA binding domain has at least 86%, 87%, 88%, 80%, 90%, 91%, 92%, 93%, 94%, 95%, 96%, 97%, 98%, 99%, or 100% sequence identity to the selected sequence. In some embodiments, the selected sequence for the DNA binding domain is SEQ ID NO: 1011. In some embodiments, the selected sequence for the DNA binding domain is SEQ ID NO: 1013. In some embodiments, the SET domain is fused to the DNA polymerase via an SGGS linker. In some embodiments, the DNA binding domain is connected to the DNA polymerase domain by a linker. In some embodiments, the DNA binding domain is connected to the DNA polymerase domain by a peptide linker in a fusion protein. In some embodiments, the peptide linker comprises a sequence selected from the group consisting of SEQ ID NOs: 272-318, 1014. In some embodiments, the fusion protein comprises the DNA polymerase and the DNA binding domain from N-terminus to C-Terminus. In some embodiments, the fusion protein comprises the DNA binding and the DNA polymerase domain from N-terminus to C-Terminus. In some embodiments, the DNA polymerase domain, the DNA binding domain, the SET domain, or a combination thereof comprise one or more nuclear localization signals. In some embodiments, the fusion protein comprises a nuclear localization signal, the DNA binding domain, the peptide linker, the DNA polymerase domain, the SGGS linker, the SET domain, and a second nuclear localization signal from N-terminus to C-terminus. In some embodiments, the sequence identities are determined by Needleman-Wunsch alignment of two protein sequences with Gap Costs set to Existence: 11 Extension: 1 where percent identity is calculated by dividing the number of identities by the length of the alignment. In some embodiments, the prime editing composition further comprises a prime editing guide RNA (PEgRNA), or a polynucleotide encoding the PEgRNA. In some embodiments, the prime editing composition further comprises a nick guide RNA (ngRNA), or a polynucleotide encoding the ngRNA.

[0022] In some embodiments, the present disclosure provides a vector comprising one or more of the polynucleotides of the prime editing compositions of the present disclosure. In some embodiments, the vector is a AAV vector. In some embodiments, the vector is an lipid nanoparticle (LNP).

[0023] In some embodiments, the present disclosure provides a pharmaceutical composition comprising the prime editing composition of the present disclosure, or the vector of the present disclosure. In some embodiments, the pharmaceutical composition further comprises a pharmaceutically acceptable excipient.

[0024] In some embodiments, the present disclosure provides an engineered reverse transcriptase (RT) that comprises an amino acid sequence with at least 85% sequence identity to an amino acid sequence selected from the group consisting of SEQ ID NOs: 81-95. In some embodiments, the amino acid sequence for the engineered RT has at least 86%, 87%, 88%, 80%, 90%, 91%, 92%, 93%, 94%, 95%, 96%, 97%, 98%, 99%, or 100% sequence identity to the selected sequence. In some embodiments, the selected sequence for the engineered RT is SEQ ID NO: 84. In some embodiments, the selected sequence for the engineered RT is SEQ ID NO: 82. In some embodiments, the selected sequence for the engineered RT is SEQ ID NO: 81

[0025] In some embodiments, the selected sequence for the engineered RT is SEQ ID NO: 91 In some embodiments, the sequence identities are determined by Needleman-Wunsch alignment of two protein sequences with Gap Costs set to Existence: 11 Extension: 1 where percent identity is calculated by dividing the number of identities by the length of the alignment.

[0026] In some embodiments, the present disclosure provides a prime editing composition that comprises a fusion protein, or a polynucleotide encoding the fusion protein, wherein the fusion protein comprises a DNA binding domain and a DNA polymerization domain connected via a peptide linker, wherein the fusion protein comprises an amino acid sequence with at least 80% sequence identity to a sequence selected from the group consisting of SEQ ID NO: 504, 939-987, 1011, 1012, 1013, 1007-1010, 504-513, 514-521. In some embodiments, the amino acid sequence of the DNA polymerase domain has at least about 86%, 87%, 88%, 80%, 90%, 91%, 92%, 93%, 94%, 95%, 96%, 97%, 98%, 99%, or 100% sequence identity to the selected sequence. In some embodiments, the selected sequence is SEQ ID NO: 940. In some embodiments, the selected sequence is SEQ ID NO: 941. In some embodiments, the selected sequence is SEQ ID NO: 976.

[0027] In some embodiments, the selected sequence is SEQ ID NO: 977. In some embodiments, the selected sequence is SEQ ID NO: 505. In some embodiments, the selected sequence is SEQ ID NO: 511.

[0028] In some embodiments, the selected sequence is SEQ ID NO: 512. In some embodiments, the sequence identities are determined by Needleman-Wunsch alignment of two protein sequences with Gap Costs set to Existence: 11 Extension: 1 where percent identity is calculated by dividing the number of identities by the length of the alignment.

[0029] In some embodiments, the present disclosure provides a vector comprising one or more of the polynucleotides of the prime editing compositions of the present disclosure. In some embodiments, the vector is a AAV vector. In some embodiments, the vector is an lipid nanoparticle (LNP).

[0030] In some embodiments, the present disclosure provides a pharmaceutical composition comprising the prime editing composition of the present disclosure, or the vector of the present disclosure.

### BRIEF DESCRIPTION OF THE DRAWINGS

[0031] The features of the present disclosure are set forth with particularity in the appended claims. A better understanding of the features and advantages of the present will be obtained by reference to the following detailed description that sets forth illustrative embodiments, in which the principles of the disclosure are utilized, and the accompanying drawings of which:

[0032] FIG. 1 a cartoon illustration of the domain structure of an exemplary prime editor comprising a DNA binding domain that is a Cas protein domain and a DNA polymerase domain (e.g., a reverse transcriptase domain) connected by a linker.

[0033] FIG. 2 is a graph showing prime editing at the HEK3 site in HEK293T cells using a SluCas9 prime editor and various PEgRNAs.

[0034] FIG. 3 is a graph showing prime editing at the FANCF locus in HEK293T cells using a prime editor with a DNA binding domain that is SpCas9, and a prime editor with a DNA binding domain that is SluCas9 with various PEgRNAs.

[0035] FIG. 4 is a graph showing editing at the FANCF locus in HEK293T cells using a prime editor with a SluCas9 DNA binding domain (left bar of pair) or a sRGN 3.3 Cas9 DNA binding domain (right bar of pair) with various PEgRNAs.

[0036] FIG. 5 is a graph showing percent editing at the VEGFA locus in HEK293 cells using prime editors with various RT homolog domains.

[0037] FIG. 6 shows illustrations of unstructured, structured, and natural linker variants useful in the prime editors disclosed herein.

[0038] FIG. 7 is a graph showing the average gene editing activity across 3 endogenous sites for prime editors comprising 47 linker variants in human HEK293T cells; the grey dot is PE2.

[0039] FIG. 8 is a graph showing the change in gene editing efficiency relative to PE2 at gene 6 endogenous sites in human HEK293T cells for prime editors comprising seven exemplary linker variants.

[0040] FIG. 9A is a maximum likelihood phylogenetic tree of RT homolog family. The scale bar represents 2 substitutions per site.

[0041] FIG. 9B is a phylogenetic tree with taxons that best represent the topology of the tree in FIG. 9A. Individual clades of RT homologs are labelled.

[0042] FIG. 10A is a simplified cartoon schematic of the domain structure of a prime editor (PE) with a Streptococcus Pyogenes Cas9 (SpCas9) domain and an RT homolog domain connected by a linker (N- and C-terminal nuclear localization signals not shown).

[0043] FIG. 10B is a box plot of prime editing efficiency at target loci VEGFA, RNF2, and HEK3 using prime editors with RT homolog sequences sampled from multiple RT homolog family members. The Y-axis indicates the percent (%) editing of the prime editor. Percent editing at three genomic loci are depicted by a dot colored according to the legend at the top. The X-axis lists the prime editors with different RT homolog sequences. The subfamily Glade of the RT homolog is labeled at the bottom. A canonical prime editor (PE) listed on the far-right is shown for comparison.

[0044] FIG. 11A is a maximum likelihood phylogenetic tree of the Zebrafish endogenous retrovirus (ZFERV) family of retroviral RTs. Reconstructed nodes in the tree, or inferred ancestral sequences, selected for gene synthesis and characterization are labeled with the corresponding node ID. The scale bar represents substitutions per site.

[0045] FIG. 11B contains bar plots showing prime editing efficiency at target loci VEGFA, RNF2, and HEK3 using PE containing inferred ancestral ZFERV RT sequences. The Y-axis indicates the percent (%) editing of the prime editor. The X-axis lists the prime editors with different ancestral ZFERV RT sequences. Prime editing efficiency using PE2 is included on the far-left of the plots for comparison.

[0046] FIG. 12A is a schematic of the construct layouts of PEs with different B1 domains of Streptococcal protein G (GB1 domains) and either full length or truncated Moloney Murine Leukemia Virus (MMLV) RT domains. The position of the amino acid sequence is labeled at the top.

[0047] FIG. 12B contains box plots of prime editing efficiency at target loci VEGFA, RNF2, and HEK3 using prime editors depicted in FIG. 12A. The Y-axis indicates the percent (%) editing of the prime editors. The X-axis lists the prime editors with GB1 domains and MMLV RT domains. The prime editing efficiency of a PE2 without a GB1 domain is shown for comparison.

[0048] FIG. 13A is a simplified cartoon schematic of the domain structure of an engineered Cas-RT prime editor where the Cas1 domain of a naturally occurring Cas1-RT fusion protein is replaced with a Cas9 domain. The CasRT and Cas9 domains are connected by the endogenouslinker. N- and C-terminal nuclear localization signals are typically included in the engineered Cas-RT prime editors (not shown).

[0049] FIG. 13B contains bar plots of prime editing efficiency at target loci VEGFA and RNF2 using different Cas-RT prime editors. The Y-axis indicates the percent (%) editing of the prime editors. The X-axis lists the Cas-RT prime editors. PE2 prime editing efficiency is shown for comparison.

[0050] FIG. 14 contains schematics for six different RT families. The domain comprising conserved sequences are illustrated on the top. The specific amino acid and sequence motif at each domain for various families are also shown. Sequences of conserved motifs, e.g., SEQ ID NOs. 905-909 and 1101-1102, respectively, are indicated for each RT family in order of appearance.

### DETAILED DESCRIPTION OF THE DISCLOSURE

[0051] Provided herein, in some embodiments, are compositions and methods related to prime editors. In some embodiments, the prime editors (PEs) provided herein can use engineered guide polynucleotides, e.g., prime editing guide RNAs (PEgRNAs), that can direct PEs to specific DNA targets and can encode DNA edits on the target gene that serve a variety of functions, including correction of disease-causing mutations.

[0052] The following description and examples illustrate embodiments of the present disclosure in detail. It is to be understood that this disclosure is not limited to the particular embodiments described herein and as such can vary. Those of skill in the art will recognize that there are numerous variations and modifications of this disclosure, which are encompassed within its scope. Although various features of the present disclosure can be described in the context of a single embodiment, the features can also be provided separately or in any suitable combination. Conversely, although the present disclosure can be described herein in the context of separate embodiments for clarity, the present disclosure can also be implemented in a single embodiment.

[0053] All terms are intended to be understood as they would be understood by a person skilled in the art. Unless defined otherwise, all technical and scientific terms used herein have the same meaning as commonly understood by one of ordinary skill in the art to which the disclosure pertains.

[0054] The section headings used herein are for organizational purposes only and are not to be construed as limiting the subject matter described.

[0055] Although various features of the present disclosure can be described in the context of a single embodiment, the features can also be provided separately or in any suitable combination. Conversely, although the present disclosure can be described herein in the context of separate embodiments for clarity, the present disclosure can also be implemented in a single embodiment.

### Definitions

[0056] The following definitions supplement those in the art and are directed to the current application and are not to be imputed to any related or unrelated case, e.g., to any commonly owned patent or application. Although any methods and materials similar or equivalent to those described herein can be used in the practice for testing of the present disclosure, the preferred materials and methods are described herein. Accordingly, the terminology used herein is for the purpose of describing particular embodiments only, and is not intended to be limiting.

[0057] Unless defined otherwise, all technical and scientific terms used herein have the same meaning as is commonly understood by one of ordinary skill in the art.

[0058] The terminology used herein is for the purpose of describing particular embodiments only and is not intended to be limiting. As used herein, the singular forms “a”, “an” and “the” are intended to include the plural forms as well, unless the context clearly indicates otherwise. Furthermore, to the extent that the terms “including”, “includes”, “having”, “has”, “with”, or variants thereof as used herein mean “comprising”.

[0059] Unless otherwise specified, the words “comprising”, “comprise”, “comprises”, “having”, “have”, “has”, “including”, “includes”, “include”, “containing”, “contains” and “contain” are inclusive or open-ended and do not exclude additional, unrecited elements or method steps.

[0060] Reference to “some embodiments”, “an embodiment”, “one embodiment”, or “other embodiments” means that a particular feature or characteristic described in connection with the embodiments is included in at least one or more embodiments, but not necessarily all embodiments, of the present disclosure.

[0061] The term “about” or “approximately” means within an acceptable error range for the particular value as determined by one of ordinary skill in the art, which will depend in part on how the value is measured or determined, i.e, the limitations of the measurement system. For example, “about” can mean within 1 standard deviation, per the practice in the art. Alternatively, “about” can mean a range of up to 20%, up to 10%, up to 5%, or up to 1% of a given value. Alternatively, particularly with respect to biological systems or processes, the term can mean within an order of magnitude, preferably within 5-fold, and more preferably within 2-fold, of a value. Where particular values are described in the application and claims, unless otherwise stated, the term “about” meaning within an acceptable error range for the particular value should be assumed.

[0062] As used herein, a “cell” can generally refer to a biological cell. A cell can be the basic structural, functional and/or biological unit of a living organism. A cell can originate from any organism having one or more cells. Some non-limiting examples include: a prokaryotic cell, eukaryotic cell, a bacterial cell, an archaeal cell, a cell of a single-cell eukaryotic organism, a protozoa cell, a cell from a plant, an animal cell, a cell from an invertebrate animal (e.g. fruit fly, cnidarian, echinoderm, nematode, etc.), a cell from a vertebrate animal (e.g., fish, amphibian, reptile, bird, mammal), a cell from a mammal (e.g., a pig, a cow, a goat, a sheep, a rodent, a rat, a mouse, a non-human primate, a human, etc.), et cetera. Sometimes a cell may not originate from a natural organism (e.g., a cell can be synthetically made, sometimes termed an artificial cell).

[0063] In some embodiments, the cell is a human cell. A cell can be of or derived from different tissues, organs, and/or cell types. In some embodiments, the cell is a primary cell. As used herein, the term “primary cell” means a cell isolated from an organism, e.g., a mammal, which is grown in tissue culture (i.e., in vitro) for the first time before subdivision and transfer to a subculture. In some embodiments, the cell is a stem cell. In some non-limiting examples, mammalian cells, including primary cells and stem cells, can be modified through introduction of one or more polynucleotides, polypeptides, and/or prime editing compositions (e.g., through transfection, transduction, electroporation, and the like) and further passaged. Such modified cells include muscle cells (e.g., cardiac muscle cells, smooth muscle cells, hepatocytes), hematopoietic stem cells (HSCs), hematopoietic stem progenitor cells (HSPC)s, fibroblasts, keratinocytes, epithelial cells (e.g., mammary epithelial cells, intestinal epithelial cells), endothelial cells, glial cells, neural cells, formed elements of the blood (e.g., lymphocytes, bone marrow cells), muscle cells and precursors of these somatic cell types. In some embodiments, the cell is a stem cell. In some embodiments, the cell is a progenitor cell. In some embodiments, the cell is a pluripotent cell (e.g., a pluripotent stem cell) In some embodiments, the cell (e.g., a stem cell) is an embryonic stem cell, tissue-specific stem cell, mesenchymal stem cell, or an induced pluripotent stem cell. In some embodiments, the cell is an induced pluripotent stem cell (iPSC). In some embodiments, the cell is an embryonic stem cell (ESC).

[0064] In some embodiments, the cell is a human stem cell. In some embodiments, the cell is a human pluripotent stem cell. In some embodiments, the cell is a human fibroblast. In some embodiments, the cell is an induced human pluripotent stem cell. In some embodiments, the cell is a human stem cell. In some embodiments, the cell is a human embryonic stem cell.

[0065] In some embodiments, the cell is a CD34⁺ cell. In some embodiments, the cell is a hematopoietic stem cell (HSC). In some embodiments, the cell is a hematopoietic progenitor cell (HPC). In some embodiments, hematopoietic stem cells and hematopoietic progenitor cells are referred to as hematopoietic stem or progenitor cells (HSPCs). In some embodiments, the cell is a human HSC. In some embodiments, the cell is a human HPC. In some embodiments, the cell is a human HSPC. In some embodiments, the cell is a long term (LT)-HSC. In some embodiments, the cell is a short-term (ST)-HSC. In some embodiments, the cell is a myeloid progenitor cell. In some embodiments, the cell is a lymphoid progenitor cell. In some embodiments, the cell is a granulocyte monocyte progenitor cell. In some embodiments, the cell is a megakaryocyte erythroid progenitor cell. In some embodiments, the cell is a multipotent progenitor cell (MPP).

[0066] In some embodiments, the cell is a stem cell. In some embodiments, the cell is a human stem cell. In some embodiments, the cell is a hematopoietic stem cell (HSC) or a hematopoietic stem and progenitor cell. In some embodiments, the HSC is from bone marrow or mobilized peripheral blood. In some embodiments the human stem cell is an induced pluripotent stem cell (iPSC). In some embodiments, the cell is a human HSC. In some embodiments, the cell is a human CD34+ cell. In some embodiments, the cell is a hematopoietic stem and progenitor cell (HSPC). In some embodiments, the cell is a human hematopoietic stem and progenitor cell (HSPC). In some embodiments, the cell is a hematopoietic progenitor cell, multipotent progenitor cell, lymphoid progenitor cell, a myeloid progenitor cell, a megakaryocyte-erythroid progenitor cell, a granulocyte-megakaryocyte progenitor cell, a granulocyte, a promyelocyte, a neutrophil, an eosinophil, a basophil, an erythrocyte, a reticulocyte, a thrombocyte, a megakaryoblast, a platelet-producing megakaryocyte, a monocyte, a macrophage, a dendritic cell, a microglia, an osteoclast, a lymphocyte, a NK cell, a B-cell, or a T-cell. In some embodiments, the cell edited by prime editing can be differentiated into, or give rise to recovery of a population of cells, e.g., common lymphoid progenitor cells, common myeloid progenitor cells, megakaryocyte-erythroid progenitor cells, granulocyte-megakaryocyte progenitor cells, granulocytes, promyelocytes, neutrophils, eosinophils, basophils, erythrocytes, reticulocytes, thrombocytes, megakaryoblasts, platelet-producing megakaryocytes, platelets, monocytes, macrophages, dendritic cells, microglia, osteoclasts, lymphocytes, such as NK cells, B-cells or T-cells. In some embodiments, the cell edited by prime editing can be differentiated into, or give rise to recovery of a population of cells, e.g., neutrophils, platelets, red blood cells, monocytes, macrophages, antigen-presenting cells, microglia, osteoclasts, dendritic cells, inner ear cell, inner ear support cell, cochlear cell and/or lymphocytes. In some embodiments, the cell is in a subject, e.g., a human subject.

[0067] In some embodiments, a cell is not isolated from an organism but forms part of a tissue or organ of an organism, e.g., a mammal. In some non-limiting examples, mammalian cells include formed elements of the blood (e.g., lymphocytes, bone marrow cells), precursors of any of these somatic cell types, and stem cells.

[0068] In some embodiments, a cell is isolated from an organism. In some embodiments, a cell is derived from an organism. In some embodiments, a cell is a differentiated cell. In some embodiments, the cell is a fibroblast. In some embodiments, the cell is differentiated from an induced pluripotent stem cell. In some embodiments, the cell is differentiated from an HSC or an HPSC. In some embodiments, the cell is differentiated from an induced pluripotent stem cell (iPSC). In some embodiments, the cell is differentiated from an embryonic stem cell (ESC).

[0069] In some embodiments, the cell is a differentiated human cell. In some embodiments, cell is a human fibroblast. In some embodiments, the cell is differentiated from an induced human pluripotent stem cell. In some embodiments, the cell is differentiated from a human iPSC or a human ESC.

[0070] In some embodiments, the cell comprises a prime editor disclosed herein. In some embodiments, the cell comprises a prime editor, a PEgRNA, or a prime editing composition disclosed herein. In some embodiments, the cell is from a human subject. In some embodiments, the human subject has a disease or condition, or is at a risk of developing a disease or a condition associated with a mutation to be corrected by prime editing. In some embodiments, the cell comprises a mutation associated with a disease or disorder. In some embodiments, the cell is from a human subject, and comprises a prime editor, a PEgRNA, or a prime editing composition disclosed herein for correction of the mutation. In some embodiments, the cell is from the human subject, and the mutation has been edited or corrected by prime editing. In some embodiments, the cell is in a human subject. In some embodiments, the cell comprises a prime editor or a prime editing composition for correction of the mutation. In some embodiments, the cell is in a human subject, and comprises a prime editor or a prime editing composition for correction of the mutation. In some embodiments, the mutation in the cell has been edited or corrected by prime editing. In some embodiments, the cell is from the human subject and the mutation has been edited or corrected by prime editing.

[0071] The term “substantially” as used herein can refer to a value approaching 100% of a given value. In some embodiments, the term can refer to an amount that can be at least about 70%, 80%, 90%, 91%, 92%, 93%, 94%, 95%, 96%, 97%, 98%, 99%, 99.9%, or 99.99% of a total amount. In some embodiments, the term can refer to an amount that can be about 100% of a total amount.

[0072] The terms “protein” and “polypeptide” can be used interchangeably to refer to a polymer of two or more amino acids joined by covalent bonds (e.g., an amide bond) that can adopt a three-dimensional conformation. In some embodiments, a protein or polypeptide comprises at least 10 amino acids, 15 amino acids, 20 ammo acids, 30 amino acids or 50 amino acids joined by covalent bonds (e.g., amide bonds). In some embodiments, a protein comprises at least two amide bonds. In some embodiments, a protein comprises multiple amide bonds. In some embodiments, a protein comprises an enzyme, enzyme precursor proteins, regulatory protein, structural protein, receptor, nucleic acid binding protein, a biomarker, a member of a specific binding pair (e.g., a ligand or aptamer), or an antibody. In some embodiments, a protein can be a full-length protein (e.g., a fully processed protein having certain biological function). In some embodiments, a protein can be a variant or a fragment of a full-length protein. For example, in some embodiments, a Cas9 protein domain comprises an H840A amino acid substitution compared to a naturally occurring S. pyogenes Cas9 protein. A variant of a protein or enzyme, for example a variant reverse transcriptase, comprises a polypeptide having an amino acid sequence that is about 60% identical, about 70% identical, about 80% identical, about 90% identical, about 95% identical, about 96% identical, about 97% identical, about 98% identical, about 99% identical, about 99.5% identical, or about 99.9% identical to the amino acid sequence of a reference protein.

[0073] In some embodiments, a protein comprises one or more protein domains or subdomains. As used herein, the term “polypeptide domain”, “protein domain”, or “domain” when used in the context of a protein or polypeptide, refers to a polypeptide chain that has one or more biological functions, e.g., a catalytic function, a protein-protein binding function, or a protein-DNA function. In some embodiments, a protein comprises multiple protein domains. In some embodiments, a protein comprises multiple protein domains that are naturally occurring. In some embodiments, a protein comprises multiple protein domains from different naturally occurring proteins. For example, in some embodiments, a prime editor can be a fusion protein comprising a Cas9 protein domain of S. pyogenes and a reverse transcriptase protein domain of a retrovirus (e.g., Moloney murine leukemia virus) or a variant of the retrovirus. A protein that comprises amino acid sequences from different origins or naturally occurring proteins can be referred to as a fusion, or chimeric protein.

[0074] In some embodiments, a protein comprises a functional variant or functional fragment of a full-length wild type protein. A “functional fragment” or “functional portion”, as used herein, refers to any portion of a reference protein (e.g., a wild type protein) that encompasses less than the entire amino acid sequence of the reference protein while retaining one or more of the functions, e.g., catalytic or binding functions. For example, a functional fragment of a reverse transcriptase can encompass less than the entire amino acid sequence of a wild type reverse transcriptase, but retains the ability under at least one set of conditions to catalyze the polymerization of a polynucleotide. When the reference protein is a fusion of multiple functional domains, a functional fragment thereof can retain one or more of the functions of at least one of the functional domains. For example, a functional fragment of a Cas9 can encompass less than the entire amino acid sequence of a wild type Cas9, but retains its DNA binding ability and lacks its nuclease activity partially or completely.

[0075] A “functional variant” or “functional mutant”, as used herein, refers to any variant or mutant of a reference protein (e.g., a wild type protein) that encompasses one or more alterations to the amino acid sequence of the reference protein while retaining one or more of the functions, e.g., catalytic or binding functions. In some embodiments, the one or more alterations to the amino acid sequence comprises amino acid substitutions, insertions or deletions, or any combination thereof. In some embodiments, the one or more alterations to the amino acid sequence comprises amino acid substitutions. For example, a functional variant of a reverse transcriptase can comprise one or more amino acid substitutions compared to the amino acid sequence of a wild type reverse transcriptase, but retains the ability under at least one set of conditions to catalyze the polymerization of a polynucleotide. When the reference protein is a fusion of multiple functional domains, a functional variant thereof can retain one or more of the functions of at least one of the functional domains. For example, in some embodiments, a functional fragment of a Cas9 can comprise one or more amino acid substitutions in a nuclease domain, e.g., a H840A amino acid substitution, compared to the amino acid sequence of a wild type Cas9, but retains the DNA binding ability and lacks the nuclease activity partially or completely.

[0076] The term “function” and its grammatical equivalents as used herein refer to a capability of operating, having, or serving an intended purpose. Functional can comprise any percent from baseline to 100% of an intended purpose. For example, functional can comprise or comprise about 5%, 10%, 15%, 20%, 25%, 30%, 35%, 40%, 45%, 50%, 55%, 60%, 65%, 70%, 75%, 80%, 85%, 90%, 95%, or up to about 100% of an intended purpose. In some embodiments, the term functional can mean over or over about 100% of normal function, for example, 125%, 150%, 175%, 200%, 250%, 300%, 400%, 500%, 600%, 700% or up to about 1000% of an intended purpose.

[0077] In some embodiments, a protein or polypeptides includes naturally occurring amino acids (e.g., one of the twenty amino acids commonly found in peptides synthesized in nature, and known by the one letter abbreviations A, R, N, C, D, Q, E, G, H, I, L, K, M, F, P, S, T, W, Y and V). In some embodiments, a protein or polypeptides includes non-naturally occurring amino acids (e.g., amino acids which is not one of the twenty amino acids commonly found in peptides synthesized in nature, including synthetic amino acids, amino acid analogs, and amino acid mimetics). In some embodiments, a protein or polypeptide is modified.

[0078] In some embodiments, a protein comprises an isolated polypeptide. The term “isolated” means free or removed to varying degrees from components which normally accompany it as found in the natural state or environment. For example, a polypeptide naturally present in a living animal is not isolated, and the same polypeptide partially or completely separated from the coexisting materials of its natural state is isolated.

[0079] In some embodiments, a protein is present within a cell, a tissue, an organ, or a virus particle. In some embodiments, a protein is present within a cell or a part of a cell (e.g., a bacteria cell, a plant cell, or an animal cell). In some embodiments, the cell is in a tissue, in a subject, or in a cell culture. In some embodiments, the cell is a microorganism (e.g., a bacterium, fungus, protozoan, or virus). In some embodiments, a protein is present in a mixture of analytes (e.g., a lysate). In some embodiments, the protein is present in a lysate from a plurality of cells or from a lysate of a single cell.

[0080] The terms “homologous,” “homology,” or “percent homology” as used herein refer to the degree of sequence identity between an amino acid and a corresponding reference amino acid sequence, or a polynucleotide sequence and a corresponding reference polynucleotide sequence. “Homology” can refer to polymeric sequences, e.g., polypeptide or DNA sequences that are similar Homology can mean, for example, nucleic acid sequences with at least about: 50%, 55%, 60%, 65%, 70%, 75%, 80%, 81%, 82%, 83%, 84%, 85%, 86%, 87%, 88%, 89%, 90%, 91%, 92%, 93%, 94%, 95%, 96%, 97%, 98%, 99%, or 100% identity. In other embodiments, a “homologous sequence” of nucleic acid sequences can exhibit 93%, 95% or 98% sequence identity to the reference nucleic acid sequence. For example, a “region of homology to a genomic region” can be a region of DNA that has a similar sequence to a given genomic region in the genome. A region of homology can be of any length that is sufficient to promote binding of a spacer, a primer binding site, or a protospacer sequence to the genomic region. For example, the region of homology can comprise at least 5, 10, 11, 12, 13, 14, 15, 16, 17, 18, 19, 20, 21, 22, 23, 24, 25, 30, 35, 40, 45, 50, 55, 60, 65, 70, 75, 80, 85, 90, 95, 100, 200, 300, 400, 500, 600, 700, 800, 900, 1000, 1100, 1200, 1300, 1400, 1500, 1600, 1700, 1800, 1900, 2000, 2100, 2200, 2300, 2400, 2500, 2600, 2700, 2800, 2900, 3000, 3100 or more bases in length such that the region of homology has sufficient homology to undergo binding with the corresponding genomic region.

[0081] When a percentage of sequence homology or identity is specified, in the context of two nucleic acid sequences or two polypeptide sequences, the percentage of homology or identity generally refers to the alignment of two or more sequences across a portion of their length when compared and aligned for maximum correspondence. When a position in the compared sequence can be occupied by the same base or amino acid, then the molecules can be homologous at that position. Unless stated otherwise, sequence homology or identity is assessed over the specified length of the nucleic acid, polypeptide or portion thereof. In some embodiments, the homology or identity is assessed over a functional portion or specified portion of the length.

[0082] Alignment of sequences for assessment of sequence homology can be conducted by algorithms known in the art, such as the Basic Local Alignment Search Tool (BLAST) algorithm, which is described in Altschul et al, J. Mol. Biol. 215:403-410, 1990. A publicly available, internet interface, for performing BLAST analyses is accessible through the National Center for Biotechnology Information. Additional known algorithms include those published in: Smith & Waterman, “Comparison of Biosequences”, Adv. Appl. Math. 2:482, 1981; Needleman & Wunsch, “A general method applicable to the search for similarities in the amino acid sequence of two proteins” J. Mol. Biol. 48:443, 1970; Pearson & Lipman “Improved tools for biological sequence comparison”, Proc. Natl. Acad. Sci. USA 85:2444, 1988; or by automated implementation of these or similar algorithms. Global alignment programs can also be used to align similar sequences of roughly equal size. Examples of global alignment programs include NEEDLE (available at www.ebi.ac.uk/Tools/psa/emboss_needle/) which is part of the EMBOSS package (Rice P et al., Trends Genet., 2000; 16: 276-277), and the GGSEARCH program https://fasta.bioch.virginia.edu/fasta_www2/, which is part of the FASTA package (Pearson W and Lipman D, 1988, Proc. Natl. Acad. Sci. USA, 85: 2444-2448). Both of these programs are based on the Needleman-Wunsch algorithm which is used to find the optimum alignment (including gaps) of two sequences along their entire length. A detailed discussion of sequence analysis can also be found in Unit 19.3 of Ausubel et al (“Current Protocols in Molecular Biology” John Wiley & Sons Inc, 1994-1998, Chapter 15, 1998). In some embodiments, alignment between a query sequence and a reference sequence is performed with Needleman-Wunsch alignment with Gap Costs set to Existence: 11 Extension: 1 where percent identity is calculated by dividing the number of identities by the length of the alignment, as further described in Altschul et al. (“Gapped BLAST and PSI-BLAST: a new generation of protein database search programs”, Nucleic Acids Res. 25:3389-3402, 1997) and Altschul et al, (“Protein database searches using compositionally adjusted substitution matrices”, FEBS J. 272:5101-5109, 2005).

[0083] A skilled person understands that amino acid (or nucleotide) positions can be determined in homologous sequences based on alignment, for example, “H840” in a reference SpCas9 sequence can correspond to H839 where a variant SpCas9 sequence omits the N-terminal Methionine, or another corresponding position in a Cas9 homolog when the Cas9 homolog is aligned against the reference SpCas9 sequence.

[0084] The term “homolog” as used herein refers to a gene or a protein that is related to another gene or protein by a common ancestral DNA sequence. A homolog can be an ortholog or a paralog. An ortholog refers to a gene or protein that is related to another gene or protein by a speciation event. A paralog refers to a gene or protein that is related to another gene or protein by a duplication event within a genome. A paralog may be within the same species of the gene or protein it is related to. A paralog may also be in a different species of the gene or protein it is related to. In some embodiments, an ortholog may retain the same function. In some embodiments, a paralog may evolve a new function.

[0085] The term “polynucleotide” or “nucleic acid molecule” can be any polymeric form of nucleotides, including DNA, RNA, a hybridization thereof, or RNA-DNA chimeric molecules. In some embodiments, a polynucleotide comprises cDNA, genomic DNA, mRNA, tRNA, rRNA, or microRNA. In some embodiments, a polynucleotide is double-stranded, e.g., a double-stranded DNA in a gene. In some embodiments, a polynucleotide is single-stranded or substantially single-stranded, e.g., single-stranded DNA or an mRNA. In some embodiments, a polynucleotide is a cell-free nucleic acid molecule. In some embodiments, a polynucleotide circulates in blood. In some embodiments, a polynucleotide is a cellular nucleic acid molecule. In some embodiments, a polynucleotide is a cellular nucleic acid molecule in a cell circulating in blood.

[0086] Polynucleotides can have any three-dimensional structure. The following are nonlimiting examples of polynucleotides: a gene or gene fragment (for example, a probe, primer, EST or SAGE tag), an exon, an intron, intergenic DNA (including, without limitation, heterochromatic DNA), messenger RNA (mRNA), transfer RNA (tRNA), ribosomal RNA (rRNA), a ribozyme, cDNA, a recombinant polynucleotide, a branched polynucleotide, a plasmid, a vector, isolated DNA, isolated RNA, sgRNA, guide RNA, a nucleic acid probe, a primer, an snRNA, a long non-coding RNA, a snoRNA, a siRNA, a miRNA, a tRNA-derived small RNA (tsRNA), an antisense RNA, an shRNA, or a small rDNA-derived RNA (srRNA).

[0087] In some embodiments, a polynucleotide comprises deoxyribonucleotides, ribonucleotides or analogs thereof. In some embodiments, a polynucleotide comprises modified nucleotides, such as methylated nucleotides and nucleotide analogs. If present, modifications to the nucleotide structure can be imparted before or after assembly of the polynucleotide. The sequence of nucleotides can be interrupted by non-nucleotide components. A polynucleotide can be further modified after polymerization, such as by conjugation with a labeling component.

[0088] In some embodiments, a polynucleotide is composed of a specific sequence of four nucleotide bases: adenine (A); cytosine (C); guanine (G); thymine (T); and uracil (U) for thymine when the polynucleotide is RNA. In some embodiments, the polynucleotide can comprise one or more other nucleotide bases, such as inosine (I), which is read by the translation machinery as guanine (G).

[0089] In some embodiments, a polynucleotide can be modified. As used herein, the terms “modified” or “modification” refers to chemical modification with respect to the A, C, G, T and U nucleotides. In some embodiments, modifications can be on the nucleoside base and/or sugar portion of the nucleosides that comprise the polynucleotide. In some embodiments, the modification can be on the internucleoside linkage (e.g., phosphate backbone). In some embodiments, multiple modifications are included in the modified nucleic acid molecule. In some embodiments, a single modification is included in the modified nucleic acid molecule.

[0090] The term “complement”, “complementary”, or “complementarity” as used herein, refers to the ability of two polynucleotide molecules to base pair with each other. Complementary polynucleotides can base pair via hydrogen bonding, which can be Watson Crick, Hoogsteen or reversed Hoogsteen hydrogen bonding. For example, an adenine on one polynucleotide molecule will base pair to a thymine or uracil on a second polynucleotide molecule and a cytosine on one polynucleotide molecule will base pair to a guanine on a second polynucleotide molecule. Two polynucleotide molecules are complementary to each other when a first polynucleotide molecule comprising a first nucleotide sequence can base pair with a second polynucleotide molecule comprising a second nucleotide sequence. For instance, the two DNA molecules 5′-ATGC-3′ and 5′-GCAT-3′ are complementary, and the complement of the DNA molecule 5′-ATGC-3′ is 5′-GCAT-3′. A percentage of complementarity indicates the percentage of nucleotides in a polynucleotide molecule which can base pair with a second polynucleotide molecule (e.g., 5, 6, 7, 8, 9, 10 out of 10 being 50%, 60%, 70%, 80%, 90%, and 100% complementary, respectively). “Perfectly complementary” means that all the contiguous nucleotides of a polynucleotide molecule will base pair with the same number of contiguous nucleotides in a second polynucleotide molecule. “Substantially complementary” as used herein refers to a degree of complementarity that can be 70%, 75%, 80%, 85%, 90%, 95%, 97%, 98%, or 99% over all or a portion of two polynucleotide molecules. In some embodiments, the portion of complementarity can be a region of 10, 15, 20, 25, 30, 35, 40, 45, 50, or more nucleotides. “Substantial complementary” can also refer to a 100% complementarity over a portion or region of two polynucleotide molecules. In some embodiments, the portion or region of complementarity between the two polynucleotide molecules is at least 60%, 65%, 70%, 75%, 80%, 85%, 90%, 95%, 97%, 98%, or 99% of the length of at least one of the two polynucleotide molecules or a functional or defined portion thereof.

[0091] As used herein, “expression” refers to the process by which polynucleotides are transcribed into mRNA and/or the process by which polynucleotides, e.g., the transcribed mRNA, translated into peptides, polypeptides, or proteins. If the polynucleotide is derived from genomic DNA, expression can include splicing of the mRNA in a eukaryotic cell. In some embodiments, expression of a polynucleotide, e.g., a gene or a DNA encoding a protein, is determined by the amount of the protein encoded by the gene after transcription and translation of the gene. In some embodiments, expression of a polynucleotide, e.g., a gene or a DNA encoding a protein, is determined by the amount of a functional form of the protein encoded by the gene after transcription and translation of the gene. In some embodiments, expression of a gene is determined by the amount of the mRNA, or transcript, that is encoded by the gene after transcription the gene. In some embodiments, expression of a polynucleotide, e.g., an mRNA, is determined by the amount of the protein encoded by the mRNA after translation of the mRNA. In some embodiments, expression of a polynucleotide, e.g., a mRNA or coding RNA, is determined by the amount of a functional form of the protein encoded by the polypeptide after translation of the polynucleotide.

[0092] The term “sequencing” as used herein, can comprise capillary sequencing, bisulfite-free sequencing, bisulfite sequencing, TET-assisted bisulfite (TAB) sequencing, ACE-sequencing, high-throughput sequencing, Maxam-Gilbert sequencing, massively parallel signature sequencing, Polony sequencing, 454 pyrosequencing, Sanger sequencing, Illumina sequencing, SOLiD sequencing, Ion Torrent semiconductor sequencing, DNA nanoball sequencing, Heliscope single molecule sequencing, single molecule real time (SMRT) sequencing, nanopore sequencing, shot gun sequencing, RNA sequencing, or any combination thereof.

[0093] The terms “equivalent” or “biological equivalent” are used interchangeably when referring to a particular molecule, or biological or cellular material, and means a molecule having minimal homology to another molecule while still maintaining a desired structure or functionality.

[0094] The term “encode” as it is applied to polynucleotides refers to a polynucleotide which is said to “encode” another polynucleotide, a polypeptide, or an amino acid if, in its native state or when manipulated by methods well known to those skilled in the art, it can be used as polynucleotide synthesis template, e.g., transcribed into an RNA, reverse transcribed into a DNA or cDNA, and/or translated to produce an amino acid, or a polypeptide or fragment thereof. In some embodiments, a polynucleotide comprising three contiguous nucleotides form a codon that encodes a specific amino acid. In some embodiments, a polynucleotide comprises one or more codons that encode a polypeptide. In some embodiments, a polynucleotide comprising one or more codons comprises a mutation in a codon compared to a wild-type reference polynucleotide. In some embodiments, the mutation in the codon encodes an amino acid substitution in a polypeptide encoded by the polynucleotide as compared to a wild-type reference polypeptide.

[0095] The term “mutation” as used herein refers to a change and/or alteration in an amino acid sequence of a protein or a nucleic acid sequence of a polynucleotide. Such changes and/or alterations can comprise the substitution, insertion, deletion and/or truncation of one or more amino acids, in the case of an amino acid sequence, and/or nucleotides, in the case of nucleic acid sequence, compared to a reference amino acid or a reference nucleic acid sequence. In some embodiments, the reference sequence is a wild-type sequence. In some embodiments, a mutation in a nucleic acid sequence of a polynucleotide encodes a mutation in the amino acid sequence of a polypeptide. In some embodiments, the mutation in the amino acid sequence of the polypeptide or the mutation in the nucleic acid sequence of the polynucleotide is a mutation associated with a disease state.

[0096] The term “subject” and its grammatical equivalents as used herein can refer to a human or a non-human. A subject can be a mammal. A human subject can be male or female. A human subject can be of any age. A subject can be a human embryo. A human subject can be a newborn, an infant, a child, an adolescent, or an adult. A human subject can be up to about 100 years of age. A human subject can be in need of treatment for a genetic disease or disorder.

[0097] The terms “treatment” or “treating” and their grammatical equivalents refer to the medical management of a subject with an intent to cure, ameliorate, or ameliorate a symptom of, a disease, condition, or disorder. Treatment can include active treatment, that is, treatment directed specifically toward the improvement of a disease, condition, or disorder. Treatment can include causal treatment, that is, treatment directed toward removal of the cause of the associated disease, condition, or disorder. In addition, this treatment can include palliative treatment, that is, treatment designed for the relief of symptoms rather than the curing of the disease, condition, or disorder. Treatment can include supportive treatment, that is, treatment employed to supplement another specific therapy directed toward the improvement of the disease, condition, or disorder. In some embodiments, a condition can be pathological. In some embodiments, a treatment may not completely cure or prevent a disease, condition, or disorder. In some embodiments, a treatment ameliorates a disease, condition, or disorder. In some embodiments, a subject can be treated for 12 hours, 24 hours, 2 days, 3 days, 4 days, 5 days, 6 days, 7 days, 2 weeks, 3 weeks, 4 weeks, 2 months, 3 months, 4 months, 5 months, 6 months, 1 year, 2 years, 3 years, 4 years, 5 years, 6 years, indefinitely, or life of the subject.

[0098] The term “ameliorate” and its grammatical equivalents means to decrease, suppress, attenuate, diminish, arrest, or stabilize the development or progression of a disease.

[0099] The terms “prevent” or “preventing” means delaying, forestalling, or avoiding the onset or development of a disease, condition, or disorder for a period of time. Prevent also means reducing risk of developing a disease, disorder, or condition. Prevention includes minimizing or partially or completely inhibiting the development of a disease, condition, or disorder. In some embodiments, a composition, e.g. a pharmaceutical composition, prevents a disorder by delaying the onset of the disorder for 12 hours, 24 hours, 2 days, 3 days, 4 days, 5 days, 6 days, 7 days, 2 weeks, 3 weeks, 4 weeks, 2 months, 3 months, 4 months, 5 months, 6 months, 1 year, 2 years, 3 years, 4 years, 5 years, 6 years, indefinitely, or life of a subject.

[0100] The term “effective amount” or “therapeutically effective amount” refers to a quantity of a composition, for example, a prime editing composition comprising a construct, that can be sufficient to result in a desired activity upon introduction into a subject as disclosed herein. An effective amount of the prime editing compositions can be provided to the target gene or cell, whether the cell is ex vivo or in vivo. An effective amount can be the amount to induce, for example, at least about a 2-fold change (increase or decrease) or more in the amount of target nucleic acid modulation (e.g., expression of a gene to produce functional a protein) observed relative to a negative control. An effective amount or dose can induce, for example, about 2-fold increase, about 3-fold increase, about 4-fold increase, about 5-fold increase, about 6-fold increase, about 7-fold increase, about 8-fold increase, about 9-fold increase, about 10-fold increase, about 25-fold increase, about 50-fold increase, about 100-fold increase, about 200-fold increase, about 500-fold increase, about 700-fold increase, about 1000-fold increase, about 5000-fold increase, or about 10,000-fold increase in target gene modulation (e.g., expression of a target gene to produce a functional protein).

[0101] The amount of target gene modulation can be measured by any suitable method known in the art. In some embodiments, the “effective amount” or “therapeutically effective amount” is the amount of a composition that is required to ameliorate the symptoms of a disease relative to an untreated patient. In some embodiments, an effective amount is the amount of a composition sufficient to introduce an alteration in a gene of interest in a cell (e.g., a cell in vitro or in vivo).

[0102] An effective amount can be the amount to induce, when administered to a population of cells, a certain percentage of the population of cells to have a correction a mutation. For example, in some embodiments, an effective amount can be the amount to induce, when administered to or introduced to a population of cells, installation of one or more intended nucleotide edits that correct a mutation in the target gene, in at least about 1%, 2%, 5%, about 10%, about 15%, about 20%, about 25%, about 30%, about 35%, about 40%, about 45%, about 50%, about 55%, about 60%, about 65%, about 70%, about 75%, about 80%, about 85%, about 90%, about 95%, or about 99% of the population of cells.

[0103] The term “reverse transcriptase” or “RT” as used herein refers to a class of enzymes that synthesize a DNA molecule from an RNA template. An RT may require the primer molecule with an exposed 3′ hydroxyl group. In some embodiments, the primer molecule of an RT may be a DNA molecule. In other cases, the primer molecule of an RT may be an RNA molecule. In some embodiments, an RT may comprise both DNA polymerase activity and RNase H activity. The two activities may reside in two separate domains in an RT.

[0104] The term “linker” as used herein refers to a bond, a chemical group, or a molecule linking two molecules or moieties, e.g., two p domains to form a fusion protein. A linker can be a peptide linker. A linker can also be a polynucleotide or oligonucleotide linker. For example, a RNA-binding protein recruitment sequence, such as a MS2 polynucleotide sequence, can be used to connect a Cas9 domain and a DNA polymerase domain of a prime editor, wherein one of the Cas9 domain and the DNA polymerase domain is fused to a MS2 coat protein. In some embodiments, a peptide linker may have various lengths, depending on the application of a linker or the sequences or molecules being linked by a linker.

[0105] The term “solubility-enhancement domain” or “SET domain” as used herein refers to a group of protein or peptide domains that enhance the solubility of a second protein or polypeptide when expressed as a fusion protein or polypeptide, relative to the second protein or polypeptide when expressed alone. A SET domain may also increase the activity of the second protein or polypeptide (e.g., enzymatic activity or nucleic acid-/protein-binding activity) when expressed as a fusion protein or polypeptide, relative to the second protein or polypeptide when expressed alone. A SET domain may also increase the expression level of the second protein or polypeptide when expressed as a fusion protein or polypeptide, relative to the second protein or polypeptide when expressed alone. A SET domain may also increase degree of folding to a native fold of the second protein or polypeptide when expressed as a fusion protein or polypeptide, relative to the second protein or polypeptide when expressed alone.

[0106] The term “fusion protein” refers to a protein comprised of domains from more than one naturally occurring or recombinantly produced protein, where generally each domain serves a different function. A domain may comprise a particular makeup of amino acids. A domain may also comprise a structure of proteins as described herein.

[0107] Prime Editing

[0108] The term “prime editing” refers to programmable editing of a target DNA using a prime editor complexed with a PEgRNA to incorporate an intended nucleotide edit (also referred to herein as a nucleotide change) into the target DNA through target-primed DNA synthesis. A target gene of prime editing can comprise a double stranded DNA molecule having two complementary strands: a first strand that can be referred to as a “target strand” or a “non-edit strand”, and a second strand that can be referred to as a “non-target strand,” or an “edit strand.” In some embodiments, in a prime editing guide RNA (PEgRNA), a spacer sequence is complementary or substantially complementary to a specific sequence on the target strand, which can be referred to as a “search target sequence”. In some embodiments, the spacer sequence anneals with the target strand at the search target sequence. The target strand can also be referred to as the “non-Protospacer Adjacent Motif (non-PAM strand).” In some embodiments, the non-target strand may also be referred to as the “PAM strand”. In some embodiments, the PAM strand comprises a protospacer sequence and optionally a protospacer adjacent motif (PAM) sequence. In prime editing using a Cas-protein-based prime editor, a PAM sequence refers to a short DNA sequence immediately adjacent to the protospacer sequence on the PAM strand of the target gene. A PAM sequence may be specifically recognized by a programmable DNA binding protein, e.g., a Cas nickase or a Cas nuclease. In some embodiments, a specific PAM is characteristic of a specific programmable DNA binding protein, e.g., a Cas nickase or a Cas nuclease. A protospacer sequence refers to a specific sequence in the PAM strand of the target gene that is complementary to the search target sequence. In a PEgRNA, a spacer sequence can have a substantially identical sequence as the protospacer sequence on the edit strand of a target gene, except that the spacer sequence can comprise Uracil (U) and the protospacer sequence may comprise Thymine (T).

[0109] In some embodiments, the double stranded target DNA comprises a nick site on the PAM strand (or non-target strand). As used herein, a “nick site” refers to a specific position in between two nucleotides or two base pairs of the double stranded target DNA. In some embodiments, the position of a nick site is determined relative to the position of a specific PAM sequence. In some embodiments, the nick site is the particular position where a nick will occur when the double stranded target DNA is contacted with a nickase, for example, a Cas nickase, that recognizes a specific PAM sequence. In some embodiments, the nick site is upstream of a specific PAM sequence on the PAM strand of the double stranded target DNA. In some embodiments, the nick site is downstream of a specific PAM sequence on the PAM strand of the double stranded target DNA. In some embodiments, the nick site is 3 base pairs upstream of the PAM sequence, and the PAM sequence is recognized by a Streptococcus pyogenes Cas9 nickase, a P. lavamentivorans Cas9 nickase, a C. diphtheriae Cas9 nickase, a N. cinerea Cas9, a S. aureus Cas9, or a N. lari Cas9 nickase. In some embodiments, the nick site is 3 base pairs upstream of the PAM sequence, and the PAM sequence is recognized by a Cas9 nickase, wherein the Cas9 nickase comprises a nuclease active HNH domain and a nuclease inactive RuvC domain. In some embodiments, the nick site is 2 base pairs upstream of the PAM sequence, and the PAM sequence is recognized by a S. thermophilus Cas9 nickase.

[0110] A “primer binding site” (PBS or primer binding site sequence) is a single-stranded portion of the PEgRNA that comprises a region of complementarity to the PAM strand (i.e., the non-target strand or the edit strand). The PBS is complementary or substantially complementary to a sequence on the PAM strand of the double stranded target DNA that is immediately upstream of the nick site. In some embodiments, in the process of prime editing, the PEgRNA complexes with and directs a prime editor to bind the search target sequence on the target strand of the double stranded target DNA and generates a nick at the nick site on the non-target strand of the double stranded target DNA. In some embodiments, the PBS is complementary to or substantially complementary to, and can anneal to, a free 3′ end on the non-target strand of the double stranded target DNA at the nick site. In some embodiments, the PBS annealed to the free 3′ end on the non-target strand can initiate target-primed DNA synthesis.

[0111] An “editing template” of a PEgRNA is a single-stranded portion of the PEgRNA that is 5′ of the PBS and comprises a region of complementarity to the PAM strand (i.e., the non-target strand or the edit strand), and comprises one or more intended nucleotide edits compared to the endogenous sequence of the double stranded target DNA. In some embodiments, the editing template and the PBS are immediately adjacent to each other. Accordingly, in some embodiments, a PEgRNA in prime editing comprises a single-stranded portion that comprises the PBS and the editing template immediately adjacent to each other. In some embodiments, the single stranded portion of the PEgRNA comprising both the PBS and the editing template is complementary or substantially complementary to an endogenous sequence on the PAM strand (i.e., the non-target strand or the edit strand) of the double stranded target DNA except for one or more non-complementary nucleotides at the intended nucleotide edit positions. As used herein, regardless of relative 5′-3′ positioning in other context, the relative positions as between the PBS and the editing template, and the relative positions as among elements of a PEgRNA, are determined by the 5′ to 3′ order of the PEgRNA as a single molecule regardless of the position of sequences in the double stranded target DNA that may have complementarity or identity to elements of the PEgRNA. In some embodiments, the editing template is complementary or substantially complementary to a sequence on the PAM strand that is immediately downstream of the nick site, except for one or more non-complementary nucleotides at the intended nucleotide edit positions. The endogenous, e.g., genomic, sequence that is complementary or substantially complementary to the editing template, except for the one or more non-complementary nucleotides at the position corresponding to the intended nucleotide edit, may be referred to as an “editing target sequence”. In some embodiments, the editing template has identity or substantial identity to a sequence on the target strand that is complementary to, or having the same position in the genome as, the editing target sequence, except for one or more insertions, deletions, or substitutions at the intended nucleotide edit positions. In some embodiments, the editing template encodes a single stranded DNA, wherein the single stranded DNA has identity or substantial identity to the editing target sequence except for one or more insertions, deletions, or substitutions at the positions of the one or more intended nucleotide edits.

[0112] In some instances, a prime editor of this disclosure is configured to bind a prime editing guide RNA (PEgRNA). In some cases, a PEgRNA comprises at least one of: a spacer, an extension arm, and a gRNA core. In some cases, a spacer may comprise a sequence that hybridizes to a first strand of a double stranded target DNA sequence. In some cases, a spacer may comprise a sequence that is complementary to a first strand of a double stranded target DNA sequence. For example, the spacer may comprise complementary sequence to a protospacer sequence in the first strand of the double stranded DNA sequence. In some cases, an extension arm may comprise a sequence that hybridizes to a second strand (i.e., the complementary strand of the first strand) of the double stranded target DNA sequence. In some cases, an extension arm may comprise a sequence that is complementary to a second strand (i.e., the complementary strand of the first strand) of the double stranded target DNA sequence. In some cases, a gRNA core may comprise a sequence that interacts with the second polypeptide (i.e., interacts with DNA binding domain of the PE). In some instances, a nucleotide of a PEgRNA may be part of a spacer. In some cases, a nucleotide of a PEgRNA may be part of an extension arm. In some cases, a nucleotide of a PEgRNA may be part of a gRNA core. In some cases, a nucleotide of a PEgRNA may be part of a spacer and an extension arm. In some cases, a nucleotide of a PEgRNA may be part of a spacer and a gRNA core. In some cases, a nucleotide of a PEgRNA may be part of an extension arm and a gRNA core. In some cases, a nucleotide of a PEgRNA may be part of a spacer and an extension arm. In some cases, a nucleotide of a PEgRNA may not be part of a spacer, an extension arm, or a gRNA core.

[0113] In some instances, a PEgRNA may be transcribed as a single RNA sequence. In some cases, a spacer, an extension arm, and a gRNA core may be in a single stranded RNA sequence. In some cases, a spacer, an extension arm, and a gRNA core may be in a single strand of a double stranded RNA sequence. In some cases, a PEgRNA may comprise a spacer, an extension arm, and a gRNA core in a single RNA sequence. In some cases, a PEgRNA may comprise a spacer, an extension arm, and a gRNA core in a single RNA sequence in a 5′-3′ orientation. In some cases, a PEgRNA may comprise a gRNA core, an extension arm, and a spacer in a single RNA sequence in a 3′-5′ orientation. In some cases, a PEgRNA may comprise a spacer, a gRNA core, and an extension arm are in a single RNA sequence in a 5′-3′ orientation. In some cases, a PEgRNA may comprise an extension arm, a spacer, and a gRNA core are in a single RNA sequence in 5′-3′ orientation. In some cases, a PEgRNA may comprise an extension arm, a gRNA core, and a spacer in a single RNA sequence in 5′-3′ orientation. In some cases, a PEgRNA may comprise a gRNA core, an extension arm, and a spacer in a single RNA sequence in 5′-3′ orientation. In some cases, a PEgRNA may comprise a gRNA core, a spacer and an extension arm in a single RNA sequence in 5′-3′ orientation. In some instances, a PEgRNA may be transcribed as multiple RNA molecules. In some cases, a spacer, an extension arm, and a gRNA core may be in multiple single stranded RNA sequences. In some cases, a spacer may be in a single stranded RNA sequence. In some cases, an extension arm may be in a single stranded RNA sequence. In some cases, a gRNA core may be in a single stranded RNA sequence.

[0114] In some cases, a spacer may comprise a sequence that hybridizes to a first strand of a double stranded target DNA sequence. In some cases, a spacer may comprise a sequence that is complementary to a first strand of a double stranded target DNA sequence. In some cases, a spacer may hybridize to a first strand of a double stranded target DNA sequence through complementary base pairing of the nucleotides. In some cases, a spacer may hybridize to a protospacer of a first strand of a double stranded target DNA sequence. In some cases, a spacer may be at least 3 nucleotides, at least 4 nucleotides, at least 5 nucleotides, at least 6 nucleotides, at least 7 nucleotides, at least 8 nucleotides, at least 9 nucleotides, at least 10 nucleotides, at least 11 nucleotides, at least 12 nucleotides, at least 13 nucleotides, at least 14 nucleotides, at least 15 nucleotides, at least 16 nucleotides, at least 17 nucleotides, at least 18 nucleotides, at least 19 nucleotides, at least 20 nucleotides, at least 30 nucleotides, at least 40 nucleotides, at least 50 nucleotides, at least 60 nucleotides, at least 70 nucleotides, at least 80 nucleotides, at least 90 nucleotides, at least 100 nucleotides, at least 200 nucleotides, at least 300 nucleotides, at least 400 nucleotides, or at least 500 nucleotides in length.

[0115] In some instances, an extension arm of a PEgRNA may comprise a primer binding site (PBS). In some cases, a second strand of a double stranded target DNA sequence may bind to the PBS of a PEgRNA. In some cases, the PBS of a PEgRNA comprises a sequence that is complementary to a second strand of a double stranded target DNA sequence. In some cases, a second strand of a double stranded target DNA sequence may bind to the PBS of a PEgRNA after the second strand of the double stranded target DNA sequence is nicked or cleaved by a prime editor (e.g., any prime editor described). In some cases, the second strand of the double stranded target DNA sequence binding or bound to the PBS of the PEgRNA may comprise a free 3′ hydroxyl end. In some cases, the PBS of a PEgRNA comprises a sequence that is complementary to a region upstream of the nick on the second strand of a double stranded target DNA sequence. In some cases, the PBS of a PEgRNA may be at least 3 nucleotides, at least 4 nucleotides, at least 5 nucleotides, at least 6 nucleotides, at least 7 nucleotides, at least 8 nucleotides, at least 9 nucleotides, at least 10 nucleotides, at least 11 nucleotides, at least 12 nucleotides, at least 13 nucleotides, at least 14 nucleotides, at least 15 nucleotides, at least 16 nucleotides, at least 17 nucleotides, at least 18 nucleotides, at least 19 nucleotides, at least 20 nucleotides, at least 30 nucleotides, at least 40 nucleotides, at least 50 nucleotides, at least 60 nucleotides, at least 70 nucleotides, at least 80 nucleotides, at least 90 nucleotides, at least 100 nucleotides, at least 200 nucleotides, at least 300 nucleotides, at least 400 nucleotides, or at least 500 nucleotides in length.

[0116] In some instances, an extension arm of a PEgRNA may comprise a DNA synthesis template. In some cases, an extension arm of a PEgRNA may comprise a PBS or a DNA synthesis template. In other cases, an extension arm of a PEgRNA may comprise a PBS and a DNA synthesis template. In some instances, a DNA synthesis template of a PEgRNA may comprise a nucleotide edit, as compared to a double stranded target DNA sequence.

[0117] In some instances, the DNA synthesis template may comprise a portion that is homologous to the double stranded target DNA sequence. In some instances, the DNA synthesis template may be homologous to the double stranded target DNA sequence. The homology between the DNA synthesis template and the double stranded target DNA sequence, in some cases, may be at least about 85%, absent a nucleotide edit in the DNA synthesis template. The homology between the DNA synthesis template and the double stranded target DNA sequence, in some cases, may be at least about 90%, absent a nucleotide edit in the DNA synthesis template. The homology between the DNA synthesis template and the double stranded target DNA sequence, in some cases, may be at least about 95%, absent a nucleotide edit in the DNA synthesis template. The homology between the DNA synthesis template and the double stranded target DNA sequence, in some cases, may be at least about 96%, absent a nucleotide edit in the DNA synthesis template. The homology between the DNA synthesis template and the double stranded target DNA sequence, in some cases, may be at least about 97%, absent a nucleotide edit in the DNA synthesis template. The homology between the DNA synthesis template and the double stranded target DNA sequence, in some cases, may be at least about 98%, absent a nucleotide edit in the DNA synthesis template. The homology between the DNA synthesis template and the double stranded target DNA sequence, in some cases, may be at least about 99%, absent a nucleotide edit in the DNA synthesis template. The homology between the DNA synthesis template and the double stranded target DNA sequence, in some cases, may be at least about 99.9%, absent a nucleotide edit in the DNA synthesis template. The homology between the DNA synthesis template and the double stranded target DNA sequence, in some cases, may be at least about 50%, at least about 55%, at least about 60%, at least about 65%, at least about 70%, at least about 75%, or at least about 80%, absent a nucleotide edit in the DNA synthesis template. The homology between the DNA synthesis template and the double stranded target DNA sequence, in some cases, may be from about 50 to about 60%, from about 55 to about 65%, from about 60 to about 70%, from about 65 to about 75%, from about 70 to about 80%, from about 75 to about 85%, from about 80 to about 90%, from about 85 to about 95%, or from about 90 to about 100%, absent a nucleotide edit in the DNA synthesis template.

[0118] In some instances, the DNA synthesis template may be homologous to the double stranded target DNA sequence. The homology between the DNA synthesis template and the double stranded target DNA sequence, in some cases, may be at least about 85%, with a nucleotide edit in the DNA synthesis template. The homology between the DNA synthesis template and the double stranded target DNA sequence, in some cases, may be at least about 90%, with a nucleotide edit in the DNA synthesis template. The homology between the DNA synthesis template and the double stranded target DNA sequence, in some cases, may be at least about 95%, with a nucleotide edit in the DNA synthesis template. The homology between the DNA synthesis template and the double stranded target DNA sequence, in some cases, may be at least about 96%, with a nucleotide edit in the DNA synthesis template. The homology between the DNA synthesis template and the double stranded target DNA sequence, in some cases, may be at least about 97%, with a nucleotide edit in the DNA synthesis template. The homology between the DNA synthesis template and the double stranded target DNA sequence, in some cases, may be at least about 98%, with a nucleotide edit in the DNA synthesis template. The homology between the DNA synthesis template and the double stranded target DNA sequence, in some cases, may be at least about 99%, with a nucleotide edit in the DNA synthesis template. The homology between the DNA synthesis template and the double stranded target DNA sequence, in some cases, may be at least about 99.9%, with a nucleotide edit in the DNA synthesis template. The homology between the DNA synthesis template and the double stranded target DNA sequence, in some cases, may be at least about 50%, at least about 55%, at least about 60%, at least about 65%, at least about 70%, at least about 75%, or at least about 80%, with a nucleotide edit in the DNA synthesis template. The homology between the DNA synthesis template and the double stranded target DNA sequence, in some cases, may be from about 50 to about 60%, from about 55 to about 65%, from about 60 to about 70%, from about 65 to about 75%, from about 70 to about 80%, from about 75 to about 85%, from about 80 to about 90%, from about 85 to about 95%, or from about 90 to about 100%, with a nucleotide edit in the DNA synthesis template.

[0119] In some instances, the DNA synthesis template may comprise a nucleotide sequence comprising at least about 85% sequence identity to a strand of a target DNA sequence. In some cases, the DNA synthesis template may comprise a nucleotide sequence comprising at least about 90% sequence identity to a strand of a target DNA sequence. In some cases, the DNA synthesis template may comprise a nucleotide sequence comprising at least about 95% sequence identity to a strand of a target DNA sequence. In some cases, the DNA synthesis template may comprise a nucleotide sequence comprising at least about 96%, at least about 97%, at least about 98%, or at least about 99% sequence identity to a strand of a target DNA sequence. In some cases, the DNA synthesis template may comprise a nucleotide sequence comprising at least about 86%, at least about 87%, at least about 88%, or at least about 89% sequence identity to a strand of a target DNA sequence. In some cases, the DNA synthesis template may comprise a nucleotide sequence comprising at least about 50%, at least about 55%, at least about 60%, at least about 65%, at least about 70%, at least about 75%, or at least about 80% sequence identity to a strand of a target DNA sequence.

[0120] In some instances, the DNA synthesis template may comprise a nucleotide sequence comprising at least about 85% sequence identity to a first strand of a target DNA sequence. In some cases, the DNA synthesis template may comprise a nucleotide sequence comprising at least about 90% sequence identity to a first strand of a target DNA sequence. In some cases, the DNA synthesis template may comprise a nucleotide sequence comprising at least about 95% sequence identity to a first strand of a target DNA sequence. In some cases, the DNA synthesis template may comprise a nucleotide sequence comprising at least about 96%, at least about 97%, at least about 98%, or at least about 99% sequence identity to a first strand of a target DNA sequence. In some cases, the DNA synthesis template may comprise a nucleotide sequence comprising at least about 86%, at least about 87%, at least about 88%, or at least about 89% sequence identity to a first strand of a target DNA sequence. In some cases, the DNA synthesis template may comprise a nucleotide sequence comprising at least about 50%, at least about 55%, at least about 60%, at least about 65%, at least about 70%, at least about 75%, or at least about 80% sequence identity to a first strand of a target DNA sequence.

[0121] In some embodiments, a PEgRNA complexes with, and directs a prime editor to bind to the search target sequence of the target gene. In some embodiments, the bound prime editor generates a nick on the edit strand (PAM strand) of the target gene at the nick site. In some embodiments, a primer binding site (PBS) of the PEgRNA anneals with a free 3′ end formed at the nick site on the edit strand, and the prime editor initiates DNA synthesis from the nick site, using the free 3′ end as a primer. Subsequently, a single-stranded DNA encoded by the editing template of the PEgRNA is synthesized. In some embodiments, the newly synthesized single-stranded DNA comprises one or more intended nucleotide edits compared to an endogenous target gene sequence. Accordingly, in some embodiments, the editing template of a PEgRNA is complementary to a sequence in the edit strand except for one or more mismatches at the intended nucleotide edit positions in the editing template. The endogenous, e.g., genomic, sequence that is partially complementary to the editing template can be referred to as an “editing target sequence”. Accordingly, in some embodiments, the newly synthesized single stranded DNA has identity or substantial identity to a sequence in the editing target sequence, except for one or more insertions, deletions, or substitutions at the intended nucleotide edit positions.

[0122] In some embodiments, the newly synthesized single-stranded DNA equilibrates with the editing target on the edit strand of the target gene for pairing with the target strand of the target gene. In some embodiments, the editing target sequence of the target gene is excised by a flap endonuclease (FEN), for example, FEN1. In some embodiments, the FEN is an endogenous FEN, for example, in a cell comprising the target gene. In some embodiments, the FEN is provided as part of the prime editor, either linked to other components of the prime editor or provided in trans. In some embodiments, the newly synthesized single stranded DNA, which comprises the intended nucleotide edit, replaces the endogenous single stranded editing target sequence on the edit strand of the target gene. In some embodiments, the newly synthesized single stranded DNA and the endogenous DNA on the target strand form a heteroduplex DNA structure at the region corresponding to the editing target sequence of the target gene. In some embodiments, the newly synthesized single-stranded DNA comprising the nucleotide edit is paired in the heteroduplex with the target strand of the target DNA that does not comprise the nucleotide edit, thereby creating a mismatch between the two otherwise complementary strands. In some embodiments, the mismatch is recognized by DNA repair machinery, e.g., an endogenous DNA repair machinery. In some embodiments, through DNA repair, the intended nucleotide edit is incorporated into the target gene.

### Prime Editor

[0123] The term “prime editor (PE)” refers to the polypeptide or polypeptide components involved in prime editing. Prime editors described herein may comprise multiple polypeptides or protein domains. In various embodiments, a prime editor includes a polypeptide domain having DNA binding activity (e.g., a DNA binding domain). In some embodiments, a prime editor comprises a polypeptide that comprises a DNA binding domain. In some embodiments, a prime editor includes a polypeptide domain having DNA polymerase activity (e.g., a DNA polymerase domain). In some embodiments, a prime editor comprises a polypeptide that comprises a DNA polymerase domain. In various embodiments, a prime editor comprises a polypeptide domain having DNA binding activity (e.g., a DNA binding domain), and a polypeptide domain having DNA polymerase activity (e.g., a DNA polymerase domain) In some embodiments, a prime editor comprises a polypeptide that comprises a DNA binding domain and a polypeptide that comprises a DNA polymerase domain.

[0124] In some embodiments, the prime editor further comprises a polypeptide domain having a nuclease activity. In some embodiments, the polypeptide domain having the nuclease activity comprises a nickase, or a fully active nuclease. In some embodiments, the DNA binding domain comprises a nuclease domain or nuclease activity. In some embodiments, the nuclease domain is a nickase, or a fully active nuclease. As used herein, the term “nickase” refers to a nuclease capable of cleaving only one strand of a double-stranded DNA target. In some embodiments, the prime editor comprises a polypeptide domain that is an inactive nuclease. In some embodiments, the DNA binding domain comprises a nuclease domain that is an inactive nuclease.

[0125] In some embodiments, the polypeptide domain having DNA binding activity (e.g., programmable DNA binding activity) comprises a nucleic acid guided DNA binding domain, for example, a CRISPR-Cas protein, for example, a Cas9 nickase, a Cpf1 nickase, or another CRISPR-Cas nuclease. In some embodiments, the DNA binding domain is a nucleic acid guided DNA binding domain for example, a CRISPR-Cas protein, for example, a Cas9 nickase, a Cpf1 nickase, or another CRISPR-Cas nuclease. In some embodiments, the DNA binding domain (e.g., a nucleic acid guided DNA binding domain is a Cas protein domain. In some embodiments, the Cas protein is a Cas9. In some embodiments, the Cas protein domain comprises a nickase or comprises a nickase activity.

[0126] In some embodiments, the polypeptide domain having DNA polymerase activity comprises a template-dependent DNA polymerase, for example, a DNA-dependent DNA polymerase or an RNA-dependent DNA polymerase. In some embodiments, the DNA binding domain comprises a template-dependent DNA polymerase for example, a DNA-dependent DNA polymerase or an RNA-dependent DNA polymerase. In some embodiments, the DNA polymerase domain comprises a reverse transcriptase domain (RT domain) or a reverse transcriptase (RT). In some embodiments, the DNA polymerase domain is a RT domain or a RT. In some embodiments, a prime editor comprises a reverse transcriptase (RT) activity. For example, the first polypeptide of the prime editor may have activity for target primed reverse transcription. In some embodiments, the polypeptide domain having DNA polymerase activity comprises a reverse transcriptase activity (e.g., activity for target primed reverse transcription).

[0127] In some embodiments, the prime editor comprises additional polypeptides involved in prime editing, for example, a polypeptide domain having a 5′ endonuclease activity, e.g., a 5′ endogenous DNA flap endonuclease (e.g., FEN1), for helping to drive the prime editing process towards the edited product formation. In some embodiments, the prime editor further comprises an RNA-protein recruitment polypeptide, for example, a MS2 coat protein.

[0128] In some embodiments, polypeptide domains of a prime editor (e.g., a DNA binding domain, a DNA polymerase domain) can be fused or linked by a peptide linker to form a fusion protein. In other embodiments, a prime editor comprises one or more polypeptide domains (e.g., a DNA binding domain, and a DNA polymerase domain) provided in trans as separate proteins, which are capable of being associated to each other through non-peptide linkages or through aptamers or recruitment sequences. For example, a prime editor can comprise a DNA binding domain and a DNA polymerase domain (e.g., a reverse transcriptase domain) fused or linked with each other by a peptide linker (e.g., linkers disclosed set forth in SEQ ID NOs: 273-318). For example, a prime editor can comprise a DNA binding domain and a DNA polymerase domain (e.g., a reverse transcriptase domain) associated with each other by an RNA-protein recruitment aptamer, e.g., a MS2 aptamer, which can, in some embodiments, be linked to a PEgRNA. Prime editor polypeptide components can be encoded by one or more polynucleotides in whole or in part. The present disclosure contemplates polynucleotides encoding the prime editor components, for example, a polynucleotide encoding a DNA binding domain, and a polynucleotide encoding a DNA polymerase domain. The present disclosure also contemplates a single polynucleotide comprising a polynucleotide encoding a DNA binding domain, and a polynucleotide encoding a DNA polymerase domain. In some embodiments, the polynucleotide encoding a DNA binding domain, and a polynucleotide encoding a DNA polymerase domain are linked by a linker polynucleotide to result in a fusion protein comprising the DNA polymerase domain and DNA binding domain linked by a linker. In some embodiments, a single polynucleotide, construct, or vector encodes the prime editor fusion protein. In some embodiments, multiple polynucleotides, constructs, or vectors each encode a polypeptide domain or portion of a domain of a prime editor, or a portion of a prime editor fusion protein. For example, a prime editor fusion protein can comprise an N-terminal portion fused to an intein-N and a C-terminal portion fused to an intein-C, each of which is individually encoded by an AAV vector. In some embodiments, components of a prime editor disclosed herein (e.g., a polypeptide comprising a DNA binding domain and/or a polypeptide comprising a DNA polymerase domain) may be brought together post-translationally via a split-intein.

[0129] In some embodiments, a prime editor comprises a DNA polymerase domain and a DNA binding domain wherein the amino acid sequences of the DNA polymerase domain and the DNA binding domain comprise a N terminus methionine. In some embodiments, a prime editor comprises a DNA polymerase domain and a DNA binding domain wherein the amino acid sequences of the DNA polymerase domain and the DNA binding domain do not comprise a N terminus methionine. In some embodiments, a prime editor comprises a DNA polymerase domain and a DNA binding domain wherein the amino acid sequence of the DNA polymerase domain comprises a N terminus methionine and the amino acid sequence of the DNA binding domain does not comprise a N terminus methionine. In some embodiments, a prime editor comprises a DNA polymerase domain and a DNA binding domain wherein the amino acid sequence of the DNA polymerase domain does not comprise a N terminus methionine and the amino acid sequence of the DNA binding domain comprises a N terminus methionine

[0130] A prime editor component thereof (e.g., a polypeptide comprising a DNA binding domain and/or a polypeptide comprising a DNA polymerase domain) can be engineered. In some embodiments, the polypeptide components of a prime editor do not naturally occur in the same organism or cellular environment. In some embodiments, the polypeptide components of a prime editor may be of different origins or from different organisms. In some embodiments, a prime editor comprises a DNA binding domain and a DNA polymerase domain that are derived from different species. In some embodiments, a prime editor comprises a Cas polypeptide (DNA binding domain) and a reverse transcriptase polypeptide (DNA polymerase) that are derived from different species. For example, a prime editor can comprise a S. pyogenes Cas9 polypeptide and a Moloney murine leukemia virus (M-MLV) reverse transcriptase polypeptide.

[0131] An RT or an RT domain may be rationally engineered, in some embodiments. Such an engineered RT or RT domain may comprise sequences or amino acid changes different from a naturally occurring RT or RT domain. In some embodiments, the engineered RT or RT domain may have improved RT activity over a naturally occurring RT or RT domain. In some embodiments, the engineered RT or RT domain may have improved prime editing efficiency over a naturally occurring RT or RT domain, when used in a prime editor.

[0132] In some embodiments, the prime editor comprises an amino acid sequence with at least 85%, at least 86%, at least 87%, at least 88%, at least 89%, at least 90%, at least 91%, at least 92%, at least 93%, at least 94%, at least 95%, at least 96%, at least 97%, at least 98%, at least 99% identical to any one of the sequences set forth in SEQ ID NO: 125-128, 504-521, 939-987, or 1007-1013, (Tables 2, 4A, 6, 8, 10, 14, 15, and 16). In some embodiments, the prime editor comprises an amino acid sequence with at least 85%, at least 86%, at least 87%, at least 88%, at least 89%, at least 90%, at least 91%, at least 92%, at least 93%, at least 94%, at least 95%, at least 96%, at least 97%, at least 98%, at least 99% identical to any one of the sequences listed in Tables 2, 4A, 6, 8, 10, 14, 15, and/or 16. In some embodiments, the prime editor comprises an amino acid sequence that has no more than 1, 2, 3, 4, 5, 6, 7, 8, 9, 10, 11, 12, 13, 14, 15, 16, 17, 18, 19, 20, 21, 22, 23, 24, 25, 26, 27, 28, 29, 30, 31, 32, 33, 34, 35, 36, 37, 38, 39, or 40 differences e.g., mutations e.g., amino acid deletions, amino acid insertions, and/or amino acid substitutions compared to any of the ammo acid sequences set forth in SEQ ID NO: 125-128, 504-521, 939-987, or 1007-1013. In some embodiments, the prime editor comprises an amino acid sequence that has no more than 1, 2, 3, 4, 5, 6, 7, 8, 9, 10, 11, 12, 13, 14, 15, 16, 17, 18, 19, 20, 21, 22, 23, 24, 25, 26, 27, 28, 29, 30, 31, 32, 33, 34, 35, 36, 37, 38, 39, or 40 differences e.g., mutations e.g., amino acid deletions, amino acid insertions, and/or amino acid substitutions compared to any of the amino acid sequences listed in any one of the Tables 2, 4A, 6, 8, 10, 14, 15, and/or 16. In some embodiments, the prime editor comprises an amino acid sequence identical to any one of the sequences set forth in SEQ ID NO: 125-128, 504-521, 939-987, or 1007-1013 (Tables 2, 4A, 8, 10, 15, and 16). In some embodiments, the prime editor comprises an amino acid sequence identical to any one of the sequences listed in any of the tables 2, 4A, 8, 10, 15, and/or 16.

### DNA Polymerase Domain

[0133] In some embodiments, a prime editor comprises a polypeptide domain (e.g., a DNA polymerase domain) comprising a DNA polymerase activity. In some embodiments, the prime editor comprises a polypeptide that comprises a DNA polymerase domain. In some embodiments, a prime editor comprises a polynucleotide that encodes a polymerase domain, e.g., a DNA polymerase domain. The DNA polymerase domain can be a wild-type DNA polymerase domain, a full-length DNA polymerase protein domain, a wild type DNA polymerase, a full-length DNA polymerase, or can be a functional mutant, a functional variant, or a functional fragment thereof. In some embodiments, the DNA polymerase domain is a template dependent DNA polymerase domain. For example, the DNA polymerase can rely on a template polynucleotide strand, e.g., the editing template sequence, for new strand DNA synthesis. In some embodiments, the prime editor comprises a DNA-dependent DNA polymerase. In some embodiments, the DNA polymerase domain is a DNA-dependent DNA polymerase. For example, a prime editor having a DNA-dependent DNA polymerase can synthesize a new single stranded DNA using a PEgRNA editing template that comprises a DNA sequence as a template. In such embodiments, the PEgRNA can be a chimeric or hybrid PEgRNA, and comprising an extension arm comprising a DNA strand. The chimeric or hybrid PEgRNA can comprise an RNA portion (including the spacer and the gRNA core) and a DNA portion (the extension arm comprising the editing template that includes a strand of DNA). In some embodiments, the prime editors provided herein comprises a DNA polymerase domain comprising an amino acid sequence that does not a have a N-terminus methionine. In some embodiments, the prime editors provided herein comprises a DNA polymerase domain comprising an amino acid sequence comprising a N-terminus methionine. In some embodiments, the amino acid sequence of a DNA polymerase domain may be N-terminally modified by one or more processing enzymes, e.g., by Methionine aminopeptidases (MAP).

[0134] The DNA polymerase domain can be a wild type DNA polymerase, for example, from eukaryotic, prokaryotic, archaeal, or viral organisms, and/or the polymerases may be modified by genetic engineering, mutagenesis, or directed evolution-based processes. The DNA polymerases can be a T7 DNA polymerase, T5 DNA polymerase, T4 DNA polymerase, Klenow fragment DNA polymerase, DNA polymerase III and the like. The DNA polymerases can be thermostable, and can include Taq, Tne, Tma, Pfu, Tfl, Tth, Stoffel fragment, VENT® and DEEPVENT® DNA polymerases, KOD, Tgo, JDF3, and mutants, variants and derivatives thereof. In some embodiments, the DNA polymerase is a bacteriophage polymerase, for example, a T4, T7, or phi29 DNA polymerase. In some embodiments, the DNA polymerase is an archaeal polymerase, for example, pol I type archaeal polymerase or a pol II type archaeal polymerase. In some embodiments, the DNA polymerase comprises a thermostable archaeal DNA polymerase. In some embodiments, the DNA polymerase comprises a eubacterial DNA polymerase, for example, Pol I, Pol II, or Pol III polymerase. In some embodiments, the DNA polymerase is a Pol I family DNA polymerase. In some embodiments, the DNA polymerase is a E. coli Pol I DNA polymerase. In some embodiments, the DNA polymerase is a Pol II family DNA polymerase. In some embodiments, the DNA polymerase is a Pyrococcus furiosus (Pfu) Pol II DNA polymerase. In some embodiments, the DNA Polymerase is a Pol IV family DNA polymerase. In some embodiments, the DNA polymerase is a E. coli Pol IV DNA polymerase.

[0135] In some embodiments, the DNA polymerase comprises an eukaryotic DNA polymerase. In some embodiments, the DNA polymerase is a Pol-beta DNA polymerase, a Pol-lambda DNA polymerase, a Pol-sigma DNA polymerase, or a Pol-mu DNA polymerase. In some embodiments, the DNA polymerase is a Pol-alpha DNA polymerase. In some embodiments, the DNA polymerase is a POLA1 DNA polymerase. In some embodiments, the DNA polymerase is a POLA2 DNA polymerase. In some embodiments, the DNA polymerase is a Pol-delta DNA polymerase. In some embodiments, the DNA polymerase is a POLD1 DNA polymerase. In some embodiments, the DNA polymerase is a POLD2 DNA polymerase. In some embodiments, the DNA polymerase is a human POLD1 DNA polymerase. In some embodiments, the DNA polymerase is a human POLD2 DNA polymerase. In some embodiments, the DNA polymerase is a POLD3 DNA polymerase. In some embodiments, the DNA polymerase is a POLD4 DNA polymerase. In some embodiments, the DNA polymerase is a Pol-epsilon DNA polymerase. In some embodiments, the DNA polymerase is a POLE1 DNA polymerase. In some embodiments, the DNA polymerase is a POLE2 DNA polymerase. In some embodiments, the DNA polymerase is a POLE3 DNA polymerase. In some embodiments, the DNA polymerase is a Pol-eta (POLH) DNA polymerase. In some embodiments, the DNA polymerase is a Pol-iota (POLI) DNA polymerase. In some embodiments, the DNA polymerase is a Pol-kappa (POLK) DNA polymerase. In some embodiments, the DNA polymerase is a Rev 1 DNA polymerase. In some embodiments, the DNA polymerase is a human Revl DNA polymerase. In some embodiments, the DNA polymerase is a viral DNA-dependent DNA polymerase. In some embodiments, the DNA polymerase is a B family DNA polymerases. In some embodiments, the DNA polymerase is a herpes simplex virus (HSV) UL30 DNA polymerase. In some embodiments, the DNA polymerase is a cytomegalovirus (CMV) UL54 DNA polymerase.

[0136] In some embodiments, the DNA polymerase is an archaeal polymerase. In some embodiments, the DNA polymerase is a Family B/pol I type DNA polymerase. For example, in some embodiments, the DNA polymerase is a homolog of Pfu from Pyrococcus furiosus. In some embodiments, the DNA polymerase is a pol II type DNA polymerase. For example, in some embodiments, the DNA polymerase is a homolog of P. furiosus DP1/DP2 2-subunit polymerase. In some embodiments, the DNA polymerase lacks 5′ to 3′ nuclease activity. Suitable DNA polymerases (pol I or pol II) can be derived from archaea with optimal growth temperatures that are similar to the desired assay temperatures.

[0137] In some embodiments, the DNA polymerase comprises a thermostable archaeal DNA polymerase. In some embodiments, the thermostable DNA polymerase is isolated or derived from Pyrococcus species (furiosus, species GB-D, woesii, abysii, horikoshii), Thermococcus species (kodakaraensis KOD1, litoralis, species 9 degrees North-7, species JDF-3, gorgonarius), Pyrodictium occultum, and Archaeoglobus fulgidus.

[0138] Polymerases may also be from eubacterial species. In some embodiments, the DNA polymerase is a Pol I family DNA polymerase. In some embodiments, the DNA polymerase is an E. coli Pol I DNA polymerase. In some embodiments, the DNA polymerase is a Pol II family DNA polymerase. In some embodiments, the DNA polymerase is a Pyrococcus furiosus (Pfu) Pol II DNA polymerase. In some embodiments, the DNA Polymerase is a Pol III family DNA polymerase. In some embodiments, the DNA Polymerase is a Pol IV family DNA polymerase. In some embodiments, the DNA polymerase is an E. coli Pol IV DNA polymerase. In some embodiments, the Pol I DNA polymerase is a DNA polymerase functional variant that lacks or has reduced 5′ to 3′ exonuclease activity.

[0139] Suitable thermostable pol I DNA polymerases can be isolated from a variety of thermophilic eubacteria, including Thermus species and Thermotoga maritima such as Thermus aquaticus (Taq), Thermus thermophilus (Tth) and Thermotoga maritima (Tma UlTma).

[0140] RT Homologs and Engineered RTs

[0141] In some embodiments, a prime editor comprises an RNA-dependent DNA polymerase domain, for example, a reverse transcriptase (RT). In some embodiments, the DNA polymerase domain is an RNA-dependent DNA polymerase domain, for example, a reverse transcriptase (RT). In some embodiments, the DNA polymerase domain is a reverse transcription (RT) domain, for example, a reverse transcriptase (RT). A RT or an RT domain can be a wild type RT domain, a full-length RT domain, or may be a functional mutant, a functional variant, or a functional fragment thereof. An RT or an RT domain of a prime editor may comprise a wild-type RT, a full length RT, a functional mutant, a functional variant, or a functional fragment thereof; or may be engineered or evolved to contain specific amino acid substitutions, truncations, or variants. An engineered RT may comprise sequences or amino acid changes different from a naturally occurring RT. In some embodiments, the engineered RT may have improved reverse transcription activity over a naturally occurring RT or RT domain. In some embodiments, the engineered RT may have improved features over a naturally occurring RT, for example, improved thermostability, reverse transcription efficiency, or target fidelity. In some embodiments, a prime editor comprising the engineered RT has improved prime editing efficiency over a prime editor having a reference naturally occurring RT. In some embodiments, a prime editor comprising the engineered RT has improved prime editing efficiency over a prime editor having a PE2 RT reference.

[0142] In some embodiments, the reverse transcriptase domain or RT may be between 200 and 800 amino acids in length, between 300 and 700 amino acids in length, or at least 400 and 600 amino acids in length. The reverse transcriptase domain or RT may be at least 200 amino acids in length, at least 300 amino acids in length, at least 400 amino acids in length, at least 500 amino acids in length, or at least 600 amino acids in length. In some embodiments, the reverse transcriptase domain or RT is 250 amino acids in length. In some embodiments, the reverse transcriptase domain or RT is 350 amino acids in length. In some embodiments, the reverse transcriptase domain or RT is 450 amino acids in length. In some embodiments, the reverse transcriptase domain or RT is 550 amino acids in length. In some embodiments, the reverse transcriptase domain or RT is 650 amino acids in length.

[0143] In some embodiments, a prime editor comprises a virus RT, for example, a retrovirus RT. In some embodiments, the RT is a virus RT, for example, a retrovirus RT. Non-limiting examples of virus RT include Moloney murine leukemia virus (M-MLV or MLVRT); human T-cell leukemia virus type 1 (HTLV-1) RT; bovine leukemia virus (BLV) RT; Rous Sarcoma Virus (RSV) RT; human immunodeficiency virus (HIV) RT, M-MFV RT, Avian Sarcoma-Leukosis Virus (ASLV) RT, Rous Sarcoma Virus (RSV) RT, Avian Myeloblastosis Virus (AMV) RT, Avian Erythroblastosis Virus (AEV) Helper Virus MCAV RT, Avian Myelocytomatosis Virus MC29 Helper Virus MCAV RT, Avian Reticuloendotheliosis Virus (REV-T) Helper Virus REV-A RT, Avian Sarcoma Virus UR2 Helper Virus (UR2AV) RT, Avian Sarcoma Virus Y73 Helper Virus YAV RT, Rous Associated Virus (RAV) RT, and Myeloblastosis Associated Virus (MAV) RT, all of which may be suitably used in the methods and composition described herein.

[0144] In some embodiments, the prime editor comprises a wild type M-MLV RT. In some embodiments, the RT domain or RT is a wild type M-MLV RT. An exemplary sequence of a wild type M-MLV RT is provided in SEQ ID NO:857. In some embodiments, the prime editor comprises a reference M-MLV RT. In some embodiments, a MMLV RT, e.g., reference MMLV RT, comprises a sequence as disclosed in SEQ ID no: 855.

[0145] Exemplary reference moloney murine leukemia virus reverse transcriptase:

(SEQ ID NO: 855)
TLNIEDEYRLHETSKEPDVSLGSTWLSDFPQAWAETGGMGLAVRQAPLI
IPLKATSTPVSIKQYPMSQEARLGIKPHIQRLLDQGILVPCQSPWNTPL
LPVKKPGTNDYRPVQDLREVNKRVEDIHPTVPNPYNLLSGLPPSHQWYT
VLDLKDAFFCLRLHPTSQPLFAFEWRDPEMGISGQLTWTRLPQGFKNSP
TLFDEALHRDLADFRIQHPDLILLQYVDDLLLAATSELDCQQGTRALLQ
TLGNLGYRASAKKAQICQKQVKYLGYLLKEGQRWLTEARKETVMGQPTP
KTPRQLREFLGTAGFCRLWIPGFAEMAAPLYPLTKTGTLFNWGPDQQKA
YQEIKQALLTAPALGLPDLTKPFELFVDEKQGYAKGVLTQKLGPWRRPV
AYLSKKLDPVAAGWPPCLRMVAAIAVLTKDAGKLTMGQPLVILAPHAVE
ALVKQPPDRWLSNARMTHYQALLLDTDRVQFGPVVALNPATLLPLPEEG
LQHNCLDILAEAHGTRPDLTDQPLPDADHTWYTDGSSLLQEGQRKAGAA
VTTETEVIWAKALPAGTSAQRAELIALTQALKMAEGKKLNVYTDSRYAF
ATAHIHGEIYRRRGLLTSEGKEIKNKDEILALLKALFLPKRLSIIHCPG
HQKGHSAEARGNRMADQAARKAAITETPDTSTLLIENSSP

[0146] In some embodiments, the prime editor comprises a M-MLV RT that comprises one or more of amino acid substitutions P51X, 567X, E69X, L139X, T197X, D200X, H204X, F209X, E302X, T306X, F309X, W313X, T330X, L345X, L435X, N454X, D524X, E562X, D583X, H594X, L603X, E607X, or D653X as compared to a reference M-MMLV RT as set forth in SEQ ID NO:855, where X is any amino acid other than the reference amino acid. In some embodiments, the prime editor comprises a M-MLV RT that comprises one or more of amino acid substitutions P51L, S67K, E69K, L139P, T197A, D200N, H204R, F209N, E302K, E302R, T306K, F309N, W313F, T330P, L345G, L435G, N454K, D524G, E562Q, D583N, H594Q, L603W, E607K, and D653N as compared to the reference M-MLV RT as set forth in SEQ ID NO:855. In some embodiments, prime editor comprises one or more amino acid substitutions D200N, T330P, L603W, T306K, and W313F as compared to the reference M-MLV RT as set forth in SEQ ID NO: 855. In some embodiments, the prime editor comprises a M-MLV RT that comprises amino acid substitutions D200N, T330P, L603W, T306K, and W313F as compared to the reference M-MLV RT as set forth in SEQ ID NO:855. In some embodiments, the prime editor comprises a M-MLV RT as set forth in SEQ ID NO: 857. In some embodiments, the prime editor comprises a M-MLV RT as set forth in SEQ ID NO: 856. In some embodiments, the prime editor comprises a M-MLV RT as set forth in SEQ ID NO: 855. In some embodiments, the prime editor comprises a M-MLV RT as set forth in SEQ ID NO:884.

[0147] In some embodiments, the RT is a M-MLV RT that comprises one or more of amino acid substitutions P51X, 567X, E69X, L139X, T197X, D200X, H204X, F209X, E302X, T306X, F309X, W313X, T330X, L345X, L435X, N454X, D524X, E562X, D583X, H594X, L603X, E607X, or D653X as compared to the reference M-MLV RT as set forth in SEQ ID NO: 855, where X is any amino acid other than the wild type amino acid. In some embodiments, the RT is a M-MMLV RT that comprises one or more of amino acid substitutions P51L, S67K, E69K, L139P, T197A, D200N, H204R, F209N, E302K, E302R, T306K, F309N, W313F, T330P, L345G, L435G, P448A, D449G, N454K, D524G, E562Q, D583N, H594Q, L603W, E607K, and D653N as compared to the reference M-MMLV RT as set forth in SEQ ID NO: 855. In some embodiments, the RT is a M-MLV RT that comprises one or more amino acid substitutions D200N, T330P, L603W, T306K, and W313F as compared to the reference M-MLV RT as set forth in SEQ ID NO: 855. In some embodiments, the RT is a M-MLV RT that comprises amino acid substitutions D200N, T330P, L603W, T306K, and W313F as compared to the reference M-MLV RT as set forth in SEQ ID NO: 855. In some embodiments, the RT that is a M-MLVRT comprising the D200N, T330P, L603W, T306K, and W313F as compared to the reference M-MMLV RT (SEQ ID NO: 855) may be referred to as a “PE2” prime editor, and the corresponding prime editing system a PE2 prime editing system.

[0148] In some embodiments, a prime editor may comprise a RT domain having an amino acid sequence with at least 85%, at least 86%, at least 87%, at least 88%, at least 89%, at least 90%, at least 91%, at least 92%, at least 93%, at least 94%, at least 95%, at least 96%, at least 97%, at least 98%, at least 99% identical to any one of the sequences set forth in SEQ ID NOs: 1-95, 129-136, 198-271, 319-493, 533-846, 855-857, 884, or 990-1006. In some embodiments, a prime editor may comprise a RT domain having an amino acid sequence with at least 85%, at least 86%, at least 87%, at least 88%, at least 89%, at least 90%, at least 91%, at least 92%, at least 93%, at least 94%, at least 95%, at least 96%, at least 97%, at least 98%, at least 99% identical to any one of the sequences listed in any of the Tables 1, 2, 3, 7, 14, 15, 16, or 23. In some embodiments, a prime editor may comprise a RT domain having an amino acid sequence that has no more than 1, 2, 3, 4, 5, 6, 7, 8, 9, 10, 11, 12, 13, 14, 15, 16, 17, 18, 19, 20, 21, 22, 23, 24, 25, 26, 27, 28, 29, 30, 31, 32, 33, 34, 35, 36, 37, 38, 39, or 40 differences e.g., mutations e.g., amino acid deletions, amino acid insertions, and/or amino acid substitutions compared to any of the amino acid sequences set forth in SEQ ID NOs: 1-95, 129-136, 198-271, 319-493, 533-846, 855-857, 884, or 990-1006. In some embodiments, a prime editor may comprise a RT domain having an amino acid sequence that has no more than 1, 2, 3, 4, 5, 6, 7, 8, 9, 10, 11, 12, 13, 14, 15, 16, 17, 18, 19, 20, 21, 22, 23, 24, 25, 26, 27, 28, 29, 30, 31, 32, 33, 34, 35, 36, 37, 38, 39, or 40 differences e.g., mutations e.g., amino acid deletions, amino acid insertions, and/or amino acid substitutions compared to any one of the amino acid sequences listed in any of the Tables 1, 2, 3, 7, 14, 15, 16, or 23. In some embodiments, a prime editor may comprise a RT domain having an amino acid sequence identical to any one of the sequences set forth in SEQ ID NO: 1-95, 129-136, 198-271, 319-493, 533-846, 855-857, 884, or 990-1006. In some embodiments, a prime editor may comprise a RT domain having an amino acid sequence identical to any one of the sequences listed in in any of the Tables 1, 2, 3, 7, 14, 15, 16, or 23.

[0149] In some embodiments, a prime editor may comprise a RT domain having an amino acid sequence with at least 85%, at least 86%, at least 87%, at least 88%, at least 89%, at least 90%, at least 91%, at least 92%, at least 93%, at least 94%, at least 95%, at least 96%, at least 97%, at least 98%, at least 99% identical to any one of the sequences set forth in SEQ ID NOs: 1-95, 198-271, 319-493, 855-857, 884, or 990-1006. In some embodiments, a prime editor may comprise a RT domain having an amino acid sequence with at least 85%, at least 86%, at least 87%, at least 88%, at least 89%, at least 90%, at least 91%, at least 92%, at least 93%, at least 94%, at least 95%, at least 96%, at least 97%, at least 98%, at least 99% identical to any one of the sequences set forth in SEQ ID NO: 5, 6, 13, 15, 16, 17, 18, 21, 22, 204, 230, 232-244, 249-257, 261, 270, 271, 327, 329, 332, 333, 337, 340, 341, 342, 344, 489, 990-1006, 209, 210, 231, 229. In some embodiments, a prime editor may comprise a RT domain having an amino acid sequence with at least 85%, at least 86%, at least 87%, at least 88%, at least 89%, at least 90%, at least 91%, at least 92%, at least 93%, at least 94%, at least 95%, at least 96%, at least 97%, at least 98%, at least 99% identical to any one of the sequences listed in any of the Tables 1, 2, 15, or 16. In some embodiments, a prime editor may comprise a RT domain having an amino acid sequence that has no more than 1, 2, 3, 4, 5, 6, 7, 8, 9, 10, 11, 12, 13, 14, 15, 16, 17, 18, 19, 20, 21, 22, 23, 24, 25, 26, 27, 28, 29, 30, 31, 32, 33, 34, 35, 36, 37, 38, 39, or 40 differences e.g., mutations e.g., amino acid deletions, amino acid insertions, and/or amino acid substitutions compared to any of the amino acid sequences set forth in SEQ ID NOs: 1-95, 198-271, 319-493, 855-857, 884, or 990-1006. In some embodiments, a prime editor may comprise a RT domain having an amino acid sequence that has no more than 1, 2, 3, 4, 5, 6, 7, 8, 9, 10, 11, 12, 13, 14, 15, 16, 17, 18, 19, 20, 21, 22, 23, 24, 25, 26, 27, 28, 29, 30, 31, 32, 33, 34, 35, 36, 37, 38, 39, or 40 differences e.g., mutations e.g., amino acid deletions, amino acid insertions, and/or amino acid substitutions compared to any of the amino acid sequences set forth in SEQ ID NOs. 5, 6, 13, 15, 16, 17, 18, 21, 22, 204, 230, 232-244, 249-257, 261, 270, 271, 327, 329, 332, 333, 337, 340, 341, 342, 344, 489, 990-1006, 209, 210, 231, 229. In some embodiments, a prime editor may comprise a RT domain having an amino acid sequence that has no more than 1, 2, 3, 4, 5, 6, 7, 8, 9, 10, 11, 12, 13, 14, 15, 16, 17, 18, 19, 20, 21, 22, 23, 24, 25, 26, 27, 28, 29, 30, 31, 32, 33, 34, 35, 36, 37, 38, 39, or 40 differences e.g., mutations e.g., amino acid deletions, amino acid insertions, and/or amino acid substitutions compared to any one of the amino acid sequences listed in any of the Tables 1, 2, 15, or 16. In some embodiments, a prime editor may comprise a RT domain having an amino acid sequence identical to any one of the sequences set forth in SEQ ID NO: 1-95, 198-271, 319-493, 855-857, 884, or 990-1006. In some embodiments, a prime editor may comprise a RT domain having an amino acid sequence identical to any one of the sequences set forth in SEQ ID NO:5, 6, 13, 15, 16, 17, 18, 21, 22, 130, 131, 204, 230, 232-244, 249-257, 261, 270, 271, 327, 329, 332, 333, 337, 340, 341, 342, 344, 489, 990-1006, 209, 210, 231, 2291n some embodiments, a prime editor may comprise a RT domain having an amino acid sequence identical to any one of the sequences listed in in any of the Tables 1, 2, 15, or 16.

[0150] In some embodiments, a prime editor may comprise a RT domain having an amino acid sequence with at least 85%, at least 86%, at least 87%, at least 88%, at least 89%, at least 90%, at least 91%, at least 92%, at least 93%, at least 94%, at least 95%, at least 96%, at least 97%, at least 98%, at least 99% identical to the sequences set forth in SEQ ID NO: 16. In some embodiments, a prime editor may comprise a RT domain having an amino acid sequence that has no more than 1, 2, 3, 4, 5, 6, 7, 8, 9, 10, 11, 12, 13, 14, 15, 16, 17, 18, 19, 20, 21, 22, 23, 24, 25, 26, 27, 28, 29, 30, 31, 32, 33, 34, 35, 36, 37, 38, 39, or 40 differences e.g., mutations e.g., amino acid deletions, amino acid insertions, and/or amino acid substitutions compared to the amino acid sequences set forth in SEQ ID NO: 16. In some embodiments, a prime editor may comprise a RT domain having an amino acid sequence identical to the sequences set forth in SEQ ID NO: 16.

[0151] In some embodiments, a prime editor may comprise a RT domain having an amino acid sequence with at least 85%, at least 86%, at least 87%, at least 88%, at least 89%, at least 90%, at least 91%, at least 92%, at least 93%, at least 94%, at least 95%, at least 96%, at least 97%, at least 98%, at least 99% identical to the sequences set forth in SEQ ID NO: 18. In some embodiments, a prime editor may comprise a RT domain having an amino acid sequence that has no more than 1, 2, 3, 4, 5, 6, 7, 8, 9, 10, 11, 12, 13, 14, 15, 16, 17, 18, 19, 20, 21, 22, 23, 24, 25, 26, 27, 28, 29, 30, 31, 32, 33, 34, 35, 36, 37, 38, 39, or 40 differences e.g., mutations e.g., amino acid deletions, amino acid insertions, and/or amino acid substitutions compared to the amino acid sequences set forth in SEQ ID NO: 18. In some embodiments, a prime editor may comprise a RT domain having an amino acid sequence identical to the sequences set forth in SEQ ID NO: 18.

[0152] In some embodiments, a prime editor may comprise a RT domain having an amino acid sequence with at least 85%, at least 86%, at least 87%, at least 88%, at least 89%, at least 90%, at least 91%, at least 92%, at least 93%, at least 94%, at least 95%, at least 96%, at least 97%, at least 98%, at least 99% identical to the sequences set forth in SEQ ID NO: 261. In some embodiments, a prime editor may comprise a RT domain having an amino acid sequence that has no more than 1, 2, 3, 4, 5, 6, 7, 8, 9, 10, 11, 12, 13, 14, 15, 16, 17, 18, 19, 20, 21, 22, 23, 24, 25, 26, 27, 28, 29, 30, 31, 32, 33, 34, 35, 36, 37, 38, 39, or 40 differences e.g., mutations e.g., amino acid deletions, amino acid insertions, and/or amino acid substitutions compared to the amino acid sequences set forth in SEQ ID NO: 261. In some embodiments, a prime editor may comprise a RT domain having an amino acid sequence identical to the sequences set forth in SEQ ID NO: 261.

[0153] In some embodiments, a prime editor may comprise a RT domain having an amino acid sequence with at least 85%, at least 86%, at least 87%, at least 88%, at least 89%, at least 90%, at least 91%, at least 92%, at least 93%, at least 94%, at least 95%, at least 96%, at least 97%, at least 98%, at least 99% identical to the sequences set forth in SEQ ID NO: 270. In some embodiments, a prime editor may comprise a RT domain having an amino acid sequence that has no more than 1, 2, 3, 4, 5, 6, 7, 8, 9, 10, 11, 12, 13, 14, 15, 16, 17, 18, 19, 20, 21, 22, 23, 24, 25, 26, 27, 28, 29, 30, 31, 32, 33, 34, 35, 36, 37, 38, 39, or 40 differences e.g., mutations e.g., amino acid deletions, amino acid insertions, and/or amino acid substitutions compared to the amino acid sequences set forth in SEQ ID NO: 270. In some embodiments, a prime editor may comprise a RT domain having an amino acid sequence identical to the sequences set forth in SEQ ID NO: 270.

[0154] In some embodiments, a RT domain may comprise an ancestral RT sequence. In some embodiments, a prime editor may comprise a RT domain having an amino acid sequence, e.g., an ancestral RT sequence with at least 85%, at least 86%, at least 87%, at least 88%, at least 89%, at least 90%, at least 91%, at least 92%, at least 93%, at least 94%, at least 95%, at least 96%, at least 97%, at least 98%, at least 99% identical to any one of the sequences set forth in SEQ ID NO: 81-95. In some embodiments, a RT domain may comprise an ancestral RT sequence. In some embodiments, a prime editor may comprise a RT domain having an amino acid sequence, e.g., an ancestral RT sequence with at least 85%, at least 86%, at least 87%, at least 88%, at least 89%, at least 90%, at least 91%, at least 92%, at least 93%, at least 94%, at least 95%, at least 96%, at least 97%, at least 98%, at least 99% identical to any one of the sequences set forth in SEQ ID NO: 81, 82, 84, 91. In some embodiments, a prime editor may comprise a RT domain having an amino acid sequence, e.g., an ancestral RT sequence with at least 85%, at least 86%, at least 87%, at least 88%, at least 89%, at least 90%, at least 91%, at least 92%, at least 93%, at least 94%, at least 95%, at least 96%, at least 97%, at least 98%, at least 99% identical to any one of the sequences listed in Table 3. In some embodiments, a prime editor may comprise a RT domain having an amino acid sequence, e.g., an ancestral RT sequence that has no more than 1, 2, 3, 4, 5, 6, 7, 8, 9, 10, 11, 12, 13, 14, 15, 16, 17, 18, 19, 20, 21, 22, 23, 24, 25, 26, 27, 28, 29, 30, 31, 32, 33, 34, 35, 36, 37, 38, 39, or 40 differences e.g., mutations e g, amino acid deletions, amino acid insertions, and/or amino acid substitutions compared to any of the amino acid sequences set forth in SEQ ID NO: 81-95. In some embodiments, a prime editor may comprise a RT domain having an amino acid sequence, e.g., an ancestral RT sequence that has no more than 1, 2, 3, 4, 5, 6, 7, 8, 9, 10, 11, 12, 13, 14, 15, 16, 17, 18, 19, 20, 21, 22, 23, 24, 25, 26, 27, 28, 29, 30, 31, 32, 33, 34, 35, 36, 37, 38, 39, or 40 differences e.g., mutations e.g., amino acid deletions, amino acid insertions, and/or amino acid substitutions compared to any of the amino acid sequences set forth in SEQ ID NO: 81, 82, 84, 91. In some embodiments, a prime editor may comprise a RT domain, having an amino acid sequence, e.g., an ancestral RT sequence that has no more than 1, 2, 3, 4, 5, 6, 7, 8, 9, 10, 11, 12, 13, 14, 15, 16, 17, 18, 19, 20, 21, 22, 23, 24, 25, 26, 27, 28, 29, 30, 31, 32, 33, 34, 35, 36, 37, 38, 39, or 40 differences e.g., mutations e g, amino acid deletions, amino acid insertions, and/or amino acid substitutions compared to any one of the amino acid sequences listed in Table 3. In some embodiments, a prime editor may comprise a RT domain, having an amino acid sequence, e.g., an ancestral RT sequence identical to any one of the sequences set forth in SEQ ID NO: 81-95. In some embodiments, a prime editor may comprise a RT domain, having an amino acid sequence, e.g., an ancestral RT sequence identical to any one of the sequences set forth in SEQ ID NO: 81, 82, 84, 91. In some embodiments, a prime editor may comprise a RT domain having an amino acid sequence, e.g., an ancestral RT sequence identical to any one of the sequences listed in Table 3.

[0155] In some embodiments, a prime editor may comprise a RT domain that is a Cas-RT. In some embodiments, the RT domains works with Cas1, Cas6, or Cas3 in RNA spacer acquisition. In some embodiments, a prime editor may comprise a RT domain, e.g., Cas-RT domain. In some embodiments, both Cas1 domain of Cas1-RT-Cas1 may be replaced with a Cas9 domain and optionally a linker sequence. In some embodiments, a prime editor may comprise a RT domain, e.g., a Cas-RT domain having an amino acid sequence, with at least 85%, at least 86%, at least 87%, at least 88%, at least 89%, at least 90%, at least 91%, at least 92%, at least 93%, at least 94%, at least 95%, at least 96%, at least 97%, at least 98%, at least 99% identical to any one of the sequences set forth in SEQ ID NO: 129-136, 345, 368, 396, or 533-846. In some embodiments, a prime editor may comprise a RT domain e.g., a Cas-RT domain having an amino acid sequence with at least 85%, at least 86%, at least 87%, at least 88%, at least 89%, at least 90%, at least 91%, at least 92%, at least 93%, at least 94%, at least 95%, at least 96%, at least 97%, at least 98%, at least 99% identical to any one of the sequences listed in Tables 1, 7, or 14. In some embodiments, a prime editor may comprise a RT domain, e.g., a Cas-RT domain having an amino acid sequence, that has no more than 1, 2, 3, 4, 5, 6, 7, 8, 9, 10, 11, 12, 13, 14, 15, 16, 17, 18, 19, 20, 21, 22, 23, 24, 25, 26, 27, 28, 29, 30, 31, 32, 33, 34, 35, 36, 37, 38, 39, or 40 differences e.g., mutations e.g., amino acid deletions, amino acid insertions, and/or amino acid substitutions compared to any of the amino acid sequences set forth in SEQ ID NO: 129-136, 345, 368, 396, or 533-846. In some embodiments, a prime editor may comprise a RT domain, e.g., a Cas-RT domain having an amino acid sequence that has no more than 1, 2, 3, 4, 5, 6, 7, 8, 9, 10, 11, 12, 13, 14, 15, 16, 17, 18, 19, 20, 21, 22, 23, 24, 25, 26, 27, 28, 29, 30, 31, 32, 33, 34, 35, 36, 37, 38, 39, or 40 differences, e.g., mutations e.g., amino acid deletions, amino acid insertions, and/or amino acid substitutions compared to any one of the amino acid sequences listed in any of the Tables 1, 7, and/or 14. In some embodiments, a prime editor may comprise a RT domain, e.g., a Cas-RT domain, having an amino acid sequence identical to any one of the sequences set forth in SEQ ID NO: 129-136, 345, 368, 396, 533-846. In some embodiments, a prime editor may comprise a RT domain having an amino acid sequence, e.g., ancestral RT sequence identical to any one of the sequences listed in any of the Tables 1, 7, and/or 14. In some embodiments, a prime editor may comprise a RT domain that is Cas9-RT-Cas9 domain. In some embodiments, a Cas9-RT-Cas9 domain may further comprise a linker sequence.

[0156] In some embodiments, a DNA polymerase domain, e.g., a reverse transcriptase domain may comprise one or more mutations. Mutant reverse transcriptases can, for example, be obtained by mutating the gene or genes encoding the reverse transcriptase of interest by site-directed or random mutagenesis. In some embodiments, the mutation may include a deletion mutation, a point mutation, a substitutional mutation and/or an insertional mutation. In some embodiments, the mutation increases the efficiency of the DNA polymerase domain, e.g., a reverse transcriptase domain, e.g., by increasing editing efficiency, e.g., by increasing reverse transcriptase activity, e.g., by increasing stability (e.g., thermostability). In some embodiments, the mutated DNA polymerase domain, e.g., the mutated RT domain may show at least 10%, at least 20%, at least 30%, at least 40%, at least 50%, at least 60%, at least 70%, at least 80%, at least 90%, at least 100%, at least 150%, at least 200%, at least 300%, at least 400%, at least 500%, at least 600%, at least 700%, at least 800%, at least 900%, or at least 1000% increase in editing efficiency compared to an unmutated DNA polymerase domain, e.g., RT domain. In some embodiments, the mutated DNA polymerase domain, e.g., the mutated RT domain may show at least 10%, at least 20%, at least 30%, at least 40%, at least 50%, at least 60%, at least 70%, at least 80%, at least 90%, at least 100%, at least 150%, at least 200%, at least 300%, at least 400%, at least 500%, at least 600%, at least 700%, at least 800%, at least 900%, or at least 1000% increased activity compared to an unmutated DNA polymerase domain, e.g., RT domain.

[0157] In some embodiments, a DNA polymerase domain, e.g., a RT domain may comprise one or more mutations selected from the group consisting of a P51 mutation, a S67 mutation, an E69 mutation, an L139 mutation, a T197 mutation, a D200 mutation, a H204 mutation, A F209 mutation, an E302 mutation, a T306 mutation, a F309 mutation, a W313 mutation, a T330 mutation, an L435 mutation, a P448 mutation, a D449 mutation, an N454 mutation, a D524 mutation, an E562 mutation, a D583 mutation, an H594 mutation, an L603 mutation, an E607 mutation, a G615 mutation, an H634 mutation, a G637 mutation, an H638 mutation, a D653 mutation, or an L671 mutation relative to the reference M-MLV RT as set forth in SEQ ID NO:855. In some embodiments, a DNA polymerase domain, e.g., a RT domain may comprise one or more mutations selected from the group consisting of a P51L mutation, a S67K mutation, an E69K mutation, an L139P mutation, a T197A mutation, a D200N mutation, a H204R mutation, A F209N mutation, an E302K mutation, a T306K mutation, a F309N mutation, a W313F mutation, a T330P mutation, an L435G mutation, a P448A mutation, a D449G mutation, an N454K mutation, a D524G mutation, an E562Q mutation, a D583N mutation, an H594Q mutation, an L603W mutation, an E607K mutation, a G615 mutation, an H634Y mutation, a G637R mutation, an H638G mutation, a D653N mutation, or an L671P mutation relative to the reference M-MLV RT as set forth in SEQ ID NO:855. In some embodiments, a DNA polymerase domain, e.g., a RT domain may comprise a mutant RT domain may comprise one or more mutations selected from D200N/T330P/L603W, T306K, W313F, L139P, E607K relative to the reference M-MLV RT as set forth in SEQ ID NO:855.

### Conserved Catalytic Residues

[0158] In some embodiments, the prime editor comprises a DNA polymerase domain, e.g., a reverse transcriptase domain that is modified, e.g., by insertion, deletion, or substitution. In some embodiments, the modified DNA polymerase domain, e.g., a reverse transcriptase domain includes one or more amino acid mutations that are located outside the catalytic domains of the polymerase, e.g., reverse transcriptase. In some embodiments, the modified polymerase, e.g., reverse transcriptase, comprises amino acid mutations (e g, amino acid substitutions, deletions, insertions, or chemical modifications located at any position other than the invariant residues, e.g., conserved catalytic residues. In some embodiments, the conserved catalytic residue is an aspartate amino acid, e.g., catalytic aspartate amino acid. In some embodiments, the catalytic aspartate amino acid is involved in incorporation of the correct nucleotide. In some embodiments, mutating an invariant residue results in at least 10%, at least 20%, at least 30%, at least 40%, at least 50%, at least 60%, at least 70%, at least 80%, at least 90%, at least 95%, at least 96%, at least 97%, at least 98%, or at least 99% loss of DNA polymerase, e.g., reverse transcriptase function. In some embodiments, mutating an invariant residue results in 100% loss of DNA polymerase, e.g., reverse transcriptase function. In some embodiments, the amino acid sequence of a DNA polymerase, e.g., reverse transcriptase may be aligned with the amino acid sequence of the reference moloney murine leukemia virus reverse transcriptase (SEQ ID NO: 855) to identify a conserved catalytic residue present in the DNA polymerase, e.g., reverse transcriptase (Table 21). Exemplary conserved catalytic residues are shown in underline in the reference moloney murine leukemia virus reverse transcriptase.

(SEQ ID NO: 855)
TLNIEDEYRLHETSKEPDVSLGSTWLSDFPQAWAETGGMGLAVRQAPLI
IPLKATSTPVSIKQYPMSQEARLGIKPHIQRLLDQGILVPCQSPWNTPL
LPVKKPGTNDYRPVQDLREVNKRVEDIHPTVPNPYNLLSGLPPSHQWYT
VLDLKDAFFCLRLHPTSQPLFAFEWRDPEMGISGQLTWTRLPQGFKNSP
TLFDEALHRDLADFRIQHPDLILLQYVDDLLLAATSELDCQQGTRALLQ
TLGNLGYRASAKKAQICQKQVKYLGYLLKEGQRWLTEARKETVMGQPTP
KTPRQLREFLGTAGFCRLWIPGFAEMAAPLYPLTKTGTLFNWGPDQQKA
YQEIKQALLTAPALGLPDLTKPFELFVDEKQGYAKGVLTQKLGPWRRPV
AYLSKKLDPVAAGWPPCLRMVAAIAVLTKDAGKLTMGQPLVILAPHAVE
ALVKQPPDRWLSNARMTHYQALLLDTDRVQFGPVVALNPATLLPLPEEG
LQHNCLDILAEAHGTRPDLTDQPLPDADHTWYTDGSSLLQEGQRKAGAA
VTTETEVIWAKALPAGTSAQRAELIALTQALKMAEGKKLNVYTDSRYAF
ATAHIHGEIYRRRGLLTSEGKEIKNKDEILALLKALFLPKRLSIIHCPG
HQKGHSAEARGNRMADQAARKAAITETPDTSTLLIENSSP

[0159] In some embodiments, the amino acid sequence of a reverse transcriptase, e.g., a reference moloney murine leukemia virus RT, e.g., SEQ ID NO: 855, may comprise one or more of D150, D224, and/or D225 conserved catalytic residues. In some embodiments, the amino acid sequence of a reverse transcriptase, may comprise one or more of conserved catalytic residues, e.g., conserved aspartate catalytic residues at positions relative to amino acid residues D150, D225, and/or D225 in a corresponding reference moloney murine leukemia virus reverse transcriptase (SEQ ID NO: 855). In some embodiments, the amino acid sequence of a reverse transcriptase, e.g., a retronb_7, e.g., SEQ ID NO: 18 may comprise one or more of D113, D191, and/or D192 conserved catalytic residues. In some embodiments, the amino acid sequence of a reverse transcriptase, e.g., a Retron_C10, e.g., SEQ ID NO: 16 may comprise one or more of D72, D159, and/or D160 conserved catalytic residues. In some embodiments, the amino acid sequence of a reverse transcriptase, e.g., a spuma_C4, e.g., SEQ ID NO: 261 may comprise one or more of D152, D214, and/or D215 conserved catalytic residues. In some embodiments, the amino acid sequence of a reverse transcriptase, e.g., a spuma_E3, e.g., SEQ ID NO: 270 may comprise one or more of D152, D156, D214, and/or D215 conserved catalytic residues. Table 21 shows exemplary conserved catalytic amino acid residues for some reverse transcriptase domains. In some embodiments, a prime editor comprises a reverse transcriptase variant derived from a reverse transcriptase shown in Table 21 and comprise one or more amino acid substitutions compared to the reverse transcriptase in Table 21, wherein the one or more amino acid substitutions does not include a substitution at a conserved catalytic residue shown in Table 21.

[0160] Table 21 shows the exemplary conserved amino acid residues for some reverse transcriptase domains

| SEQ ID NO. | Name | Catalytic Residues |
|---|---|---|
| 855 | reference moloney | D150, D224, D225 |
| | murine leukemia virus | |
| 16 | Retron_C10 | D72, D159, D160 |
| 18 | Retron_B7 | D113, D191, D192 |
| 261 | Spuma_C4 | D152, D214, D215 |
| 270 | Spuma_E3 | D152, D156, D214, D215, |

[0161] In some embodiments, the RT or RT domain can be an RT variant. In some embodiments, a prime editor comprises a DNA polymerase domain that is an RT variant. In some embodiments, the RT domain is a RT variant. The RT variant may be a functional fragment of a reference RT (e.g., a RT set forth in SEQ ID NO: 855, or an RT domain, for example, provided in Tables 1, 2, 3, 7, and 14) that has at least 1, 2, 3, 4, 5, 6, 7, 8, 9, 10, 11, 12, 13, 14, 15, 16, 17, 18, 19, 20, 21, 22, 21, 24, 25, 26, 27, 28, 29, 30, 31, 32, 33, 34, 35, 36, 37, 38, 39, 40, 41, 42, 43, 44, 45, 46, 47, 48, 49, 50, or up to 100, or up to 200, or up to 300, or up to 400, or up to 500 or more amino acid changes (e.g., amino acid substitution and/or amino acid deletion) compared to a reference RT, (e.g., a RT set forth in SEQ ID NO: 855, or a RT set forth in SEQ ID NO: 856, or a RT domain, for example, provided in Tables 1, 2, 3, 7, and 14). In some embodiments, the RT variant comprises a fragment of a reference RT, e.g., a RT set forth in SEQ ID NO: 855, a RT set forth in 856, or an RT domain, for example, provided in Table 1, 2, 3, 7, and 14, such that the fragment is at least about 50% identical, about 60%, identical, about 70% identical, about 80% identical, about 90% identical, about 95% identical, about 96% identical, about 97% identical, about 98% identical, about 99% identical, about 99.5% identical, or about 99.9% identical to the corresponding fragment of the reference RT e.g., a RT set forth in SEQ ID NO: 855, a RT set forth in SEQ ID NO: 856, or an RT domain, for example, provided in Table 1, 2, 3, 4, 7, and 14. In some embodiments, the fragment is at least 30%, 35%, 40%, 45%, 50%, 55%, 60%, 65%, 70%, 75%, 80%, 85%, 90%, 95% identical, 96%, 97%, 98%, 99%, or 99.5% of the amino acid length of a reference sequence, e.g., M-MLV reverse transcriptase set forth in set forth in SEQ ID NO: 855, a RT set forth in SEQ ID NO: 856, an RT provided in Tables 1, 2, 3, 4, 7, and 14.

[0162] In some embodiments, the RT functional fragment is at least 100 amino acids in length. In some embodiments, the RT functional fragment is at least 100, 150, 200, 250, 300, 350, 400, 450, 500, 550, or up to 600 or more amino acids in length.

[0163] In still other embodiments, a RT variant (e.g., a RT functional fragment) is a RT truncated variant that is truncated at the N-terminus or the C-terminus, or both, by a certain number of amino acids which results in a truncated variant which still retains sufficient DNA polymerase function. In some embodiments, the RT truncated variant has a truncation of at least 1, at least 2, at least 3, at least 4, at least 5, at least 6, at least 7, at least 8, at least 9, at least 10, at least 11, at least 12, at least 13, at least 14, at least 15, at least 16, at least 17, at least 18, at least 19, at least 20, at least 21, at least 22, at least 23, at least 24, at least 25, at least 30, 40, 50, 60, 70, 80, 90, 100, 110, 120, 130, 140, 150, 160, 170, 180, 190, 200, 210, 220, 230, 240, or 250 amino acids at the N-terminal end compared to a reference RT, e.g., a MMLV RT set forth in SEQ ID NO: 855), a RT set forth in SEQ ID NO: 856, or a RT domain, for example, provided in Tables 1, 3, 7, and 14. In some embodiments, the reference RT is a M-MLV RT set forth in SEQ ID NO: 855. In other embodiments, the RT truncated variant has a truncation of at least 1, at least 2, at least 3, at least 4, at least 5, at least 6, at least 7, at least 8, at least 9, at least 10, at least 11, at least 12, at least 13, at least 14, at least 15, at least 16, at least 17, at least 18, at least 19, at least 20, at least 21, at least 22, at least 23, at least 24, at least 25, at least 30, 40, 50, 60, 70, 80, 90, 100, 110, 120, 130, 140, 150, 160, 170, 180, 190, 200, 210, 220, 230, 240, or 250 amino acids at the C-terminal end compared to a reference RT, e.g., a M-MLV RT set forth in SEQ ID NO: 855, a RT set forth in SEQ ID NO: 856, or a RT domain, for example, provided in Tables 1, 2, 3, 4, 7, and 14. In some embodiments, the reference RT is a M-MLV RT sequence set forth in SEQ ID NO: 855. In still other embodiments, the RT truncated variant has a truncation at the N-terminal and the C-terminal end compared to a reference RT, e.g., a M-MLV-RT of SEQ ID NO: 855, a RT set forth in SEQ ID NO: 856, or a RT domain, for example, provided in Tables 1, 2, 3, 4, 7, and 14. In some embodiments, the N-terminal truncation and the C-terminal truncation are of the same length. In some embodiments, the N-terminal truncation and the C-terminal truncation are of different lengths.

[0164] In some embodiments, the prime editors may include a functional variant of a reference M-MLV reverse transcriptase (e.g., as set forth in SEQ ID NO: 855). In some embodiments, the prime editors comprises a RT domain provided in Tables 1, 2, 3, 4, 7, and 14. In some embodiments, the RT or RT domain is a functional variant of a reference M-MLV RT (e.g., as set forth in SEQ ID NO: 855), a RT set forth in SEQ ID NO: 856, or a RT domain provided in Tables 1, 2, 3, 4, 7, and 14. In some embodiments, the functional variant of M-MLV RT is truncated after amino acid position 502 compared to a M-MLV RT as set forth in SEQ ID NO: 855, a RT set forth in SEQ ID NO: 856, or a RT domain provided in Tables 1, 2 3, 4, 7, and 14. In some embodiments, the functional variant of M-MLV RT further comprises a D200X, T306X, W313X, and/or T330X amino acid substitution compared to a reference M-MLV RT as set forth in SEQ ID NO: 855, or a RT domain provided in Tables 1, 2, 3, 7, and 14, wherein X is any amino acid other than the original amino acid. In some embodiments, the functional variant of M-MLV RT further comprises a D200N, T306K, W313F, and/or T330P amino acid substitution compared to a reference M-MLV RT as set forth in SEQ ID NO: 855, or a RT domain provided in Tables 1, 2, 3, 7, and 14 wherein X is any amino acid other than the original amino acid. A DNA sequence encoding a prime editor comprising this truncated RT is 522 bp smaller than PE2, and therefore makes its potentially useful for applications where delivery of the DNA sequence is challenging due to its size (i.e., adeno-associated virus and lentivirus delivery). In some embodiments, the M-MLV RT variant consists of the following amino acid sequence:

(SEQ ID NO: 884)
TLNIEDEYRLHETSKEPDVSLGSTWLSDFPQAWAETGGMGLAVRQAPLI
IPLKATSTPVSIKQYPMSQEARLGIKPHIQRLLDQGILVPCQSPWNTPL
LPVKKPGTNDYRPVQDLREVNKRVEDIHPTVPNPYNLLSGLPPSHQWYT
VLDLKDAFFCLRLHPTSQPLFAFEWRDPEMGISGQLTWTRLPQGFKNSP
TLFNEALHRDLADFRIQHPDLILLQYVDDLLLAATSELDCQQGTRALLQ
TLGNLGYRASAKKAQICQKQVKYLGYLLKEGQRWLTEARKETVMGQPTP
KTPRQLREFLGKAGFCRLFIPGFAEMAAPLYPLTKPGTLFNWGPDQQKA
YQEIKQALLTAPALGLPDLTKPFELFVDEKQGYAKGVLTQKLGPWRRPV
AYLSKKLDPVAAGWPPCLRMVAAIAVLTKDAGKLTMGQPLVILAPHAVE
ALVKQPPDRWLSNARMTHYQALLLDTDRVQFGPVVALNPATLLPLPEEG
LQHNCLDNSRLIN.

[0165] In some embodiments, the reverse transcriptase domain comprises an amino acid sequence that is at least 85%, at least 86%, at least 87%, at least 88%, at least 89%, at least 90%, at least 91%, at least 92%, at least 93%, at least 94%, at least 95%, at least 96%, at least 97%, at least 98%, at least 99% identical to any one of the sequences set forth in SEQ ID NO: 5, 6, 13, 15, 16, 17, 18, 21, 22, 130, 131, 204, 230, 232-244, 249-257, 261, 270, 271, 327, 329, 332, 333, 337, 340, 341, 342, 344, 489, 990-1006, 209, 210, 231, 229 provided in Tables 1, 2, or 7. In some embodiments, the reverse transcriptase domain comprises an amino acid sequence identical to any one of the sequences set forth in SEQ ID NO: 5, 6, 13, 15, 16, 17, 18, 21, 22, 130, 131, 204, 230, 232-244, 249-257, 261, 270, 271, 327, 329, 332, 333, 337, 340, 341, 342, 344, 489, 990-1006, 209, 210, 231, 229 (Tables 1, 2). Exemplary reverse transcriptase domains are shown in Tables 1, 2, 3, 7, and 14.

[0166] In some embodiments, the RT domain comprises an amino acid sequence that is at least about 50%, at least about 55%, at least about 60%, at least about 65%, at least about 70%, at least about 75%, at least about 80%, at least about 85%, at least about 86%, at least about 87%, at least about 88%, at least about 89%, at least about 90%, at least about 91%, at least about 92%, at least about 93%, at least about 94%, at least about 95%, at least about 96%, at least about 97%, at least about 98%, at least about 99% identical to a sequence selected from the group consisting of: SEQ ID NOs: 1-95, 198-271, 319-493, 533-846, 855-857, 884, or 990-1006. In some embodiments, the RT domain comprises an amino acid sequence that is selected from the group consisting of: SEQ ID NOs: 1-95, 198-271, 319-493, 533-846, 855-857, 884, or 990-1006. In some embodiments, the RT domain comprises an amino acid sequence that has no more than 1, 2, 3, 4, 5, 6, 7, 8, 9, 10, 11, 12, 13, 14, 15, 16, 17, 18, 19, 20, 25, 30, 35, 40, 45, or 50 differences e.g., mutations e.g., deletions or substitutions compared to any of the amino acid sequences set forth in SEQ ID NO: 1-95, 198-271, 319-493, 533-846, 855-857, 884, or 990-1006.

[0167] RT Families

[0168] RT domains used in prime editors can comprise multiple functional domains. In some embodiments, an RT domain may comprise a domain 1, a domain 2, a domain 3, a domain 4, a domain 5, a domain 6, a domain 7, and/or a Thumb domain. In some embodiments, a first polypeptide may comprise a domain 1, a domain 2, a domain 3, a domain 4, a domain 5, a domain 6, a domain 7, or a Thumb domain. In some embodiments, a domain 1, a domain 2, a domain 3, a domain 4, a domain 5, a domain 6, a domain 7, or a Thumb domain may also be part of a DNA polymerase domain, e.g., an RNA-mediated DNA polymerase domain. In some embodiments, a plurality of RT domains may share the domain structure of domain 1, domain 2, domain 3, domain 4, domain 5, domain 6, domain 7, and the Thumb domain. The plurality of RT domains may be grouped into a plurality of RT families based on a specific sequence or structure feature in any of the domains thereof. In some embodiments, a plurality of RT domains may be grouped into six families as described in FIG. 14. In some embodiments, a method to classify the RT domains based on the domain structure thereof is described in Example 6.

[0169] In some embodiments, a DNA polymerase domain in a prime editor may be modified compared to a wild type form. For example, a prime editor may comprise a truncated RT domain. In some embodiments, one or more domains of a naturally occurring RT is truncated or reduced for use in a prime editor. In some embodiments, the RT is a retro viral RT (e.g., MMLV-RT) wherein a RNaseH domain of the wild type retroviral RT is truncated or deleted. In some embodiments, amino acid sequences connecting one or more of domain 1 and domain 2, domain 2 and domain 3, domain 3 and domain 4, domain 4 and domain 5, domain 5 and domain 6, domain 6 and domain 7, or domain 7 and thumb domain of a naturally occurring RT may be truncated or deleted for use in a prime editor.

[0170] In some embodiments, an RT domain of a prime editor may be selected from the group consisting of an nLTR RT domain, an LTR RT domain, a Group II intron RT domain, a Retron RT domain, a TERT RT domain, and an RVT_like RT domain. In some embodiments, an RT domain may be selected from the group consisting of a nLTR RT domain, an LTR RT domain, a Group II intron RT domain, a Retron RT domain, a TERT RT domain, and an RVT_like RT domain. In some embodiments, an RT domain of a prime editor may comprise an nLTR RT domain. In some embodiments, an RT domain of a prime editor may comprise an LTR RT domain. In some embodiments, an RT domain of a prime editor may comprise a Group II intron RT domain. In some embodiments, an RT domain of a prime editor may comprise a Retron RT domain. In some embodiments, an RT domain of a prime editor may comprise a TERT RT domain. In some embodiments, an RT domain of a prime editor may comprise an RVT_like RT domain. In some embodiments, a DNA polymerase domain or an RNA-mediated DNA polymerase domain of a prime editor may comprise the RT domain thereof or any combinations described herein.

[0171] In some embodiments, a prime editor comprises an RT domain comprising an aspartic acid in domain 3. In some embodiments, a prime editor comprises an RT domain comprising the amino acid sequence YxDD in domain 5, wherein x is any amino acid. In some embodiments, a prime editor comprises an RT domain comprising an aspartic acid in domain 3 and the amino acid sequence YxDD in domain 5, wherein x is any amino acid. In some embodiments, the RT domain is a nLTR RT domain. An nLTR RT domain of a prime editor may comprise any combinations of the amino acid or sequence described herein. The amino acid or sequence described herein may also apply to an nLTR RT domain of an RT or a polypeptide. The amino acid or sequence described herein may not be restricted to the nLTR RT domain of a prime editor.

[0172] In some embodiments, a prime editor comprises an RT domain comprising the amino acid sequence PPxxxxIPK(SEQ ID NO: 905) in domain 1, wherein x is any amino acid. In some embodiments, a prime editor comprises an RT domain comprising the amino acid sequence QAIL (SEQ ID NO: 906) at position between domain 2 and domain 3. In some embodiments, a prime editor comprises an RT domain comprising the amino acid sequence RxLGIPxxDR (SEQ ID NO: 907) in domain 3, wherein x is any amino acid. In some embodiments, the prime editor comprises an RT domain comprising the amino acid sequence GTQGG (SEQ ID NO: 908) in domain 4. In some embodiments, the prime editor comprises an RT domain comprising the amino acid sequence ELERR (SEQ ID NO: 909) between domain 4 and domain 5 In some embodiments, the prime editor comprises an RT domain comprising the amino acid sequence LG in domain 7 In some embodiments, a prime editor comprises an RT domain comprising the amino acid sequence PPxxxxIPK (SEQ ID NO: 905) in domain 1, the amino acid sequence QAIL (SEQ ID NO: 906) at position between domain 2 and domain 3. In some embodiments, the amino acid sequence RxLGIPxxDR (SEQ ID NO: 907) in domain 3, the amino acid sequence GTQGG (SEQ ID NO: 908) in domain 4, the amino acid sequence ELERR(SEQ ID NO: 909) between domain 4 and domain 5, and/or the amino acid sequence LG in domain 7, or any combination thereof, where x is any amino acid. In some embodiments, the RT domain is a Group II intron RT domain. A Group II intron RT domain of a prime editor may comprise any combinations of the amino acid or sequence described herein. The amino acid or sequence described herein may also apply to a Group II intron RT domain of an RT or a polypeptide. The amino acid or sequence described herein may not be restricted to the Group II intron RT domain of a prime editor.

[0173] In some embodiments, a prime editor may comprise a RT domain comprising the amino acid sequence NAxxH between domain 2 and domain 3, wherein x is any amino acid. In some embodiments, the prime editor comprises the amino acid sequence DFF in domain 3; GxxS in domain 4, wherein x is any amino acid; and/or YTRxxYxxDDxxS in domain 5, wherein x is any amino acid. In some embodiments, the prime editor comprises a RT domain comprising the amino acid sequence NAxxH (SEQ ID NO: 910) between domain 2 and domain 3, wherein x is any amino acid. In some embodiments, the prime editor comprises a RT domain comprising the amino acid sequence DFF in domain 3; or GxxS in domain 4 In some embodiments, the prime editor comprises a RT domain comprising the amino acid sequence YTRxxYxxDDxxS (SEQ ID NO: 910) in domain 5, wherein x is any amino acid. In other embodiments, the prime editor comprises a RT domain comprising the amino acid sequence NAxxH between domain 2 and domain 3; DFF at position in domain 3; GxxS in domain 4, and/or YTRxxYxxDDxxS (SEQ ID NO: 910) in domain 5, wherein x is any amino acid. In some embodiments, the RT domain is a Retron RT domain of a prime editor may comprise any combinations of the amino acid or sequence described herein. The amino acid or sequence described herein to a Retron RT domain of an RT or a polypeptide. The amino acid or sequence described herein may not be restricted to the Retron RT domain of a prime editor.

[0174] In some embodiments, a prime editor comprises an eukaryotic RT, for example, a yeast, drosophila, rodent, or primate RT. In some embodiments, the RT or RT domain is an eukaryotic RT, for example, a yeast, drosophila, rodent, or primate RT. In some embodiments, the prime editor comprises a Group II intron RT, for example, a. Geobacillus stearothermophilus Group II Intron (GsI-IIC) RT or a Eubacterium rectale group II intron (Eu.re.I2) RT. In some embodiments, the RT or RT domain is a Group II intron RT, for example, a. Geobacillus stearothermophilus Group II Intron (GsI-IIC) RT or a Eubacterium rectale group II intron (Eu.re.I2) RT. In some embodiments, the prime editor comprises a retron RT. In some embodiments, RT or RT domain comprises a retron RT.

### Ancestral Reverse Transcriptase

[0175] Components of prime editors described herein may comprise engineered protein sequence that share evolutionary ancestors with currently known proteins. For example, a prime editor may comprise a DNA polymerase that is reverse transcriptase (RT) polypeptide that comprises an ancestral sequence of a family of RTs. Sequences from National Center for Biotechnology Information (NCBI), UniProt, EMBL, International Nucleotide Sequence Database Collaboration (INSDC), European Nucleotide Archive, or other databases may be used to construct ancestral sequences. The collected sequences may be aligned by a multiple sequence alignment (MSA) algorithm. An MSA alignment algorithm may ClustalW, Kalign, MAFFT, MUSCLE, T-Coffee, derivatives thereof, or any combinations thereof. Methods to handle gaps in sequence alignments may comprise Probabilistic Alignment Kit (PRANK) or any derivatives thereof. Methods to handle gaps in sequence alignments, in some embodiments, may also comprise RaxML. In some embodiments, an evolutionary model may be used to construct an ancestral phylogeny tree. An evolutionary model may comprise Dayhoff models, for example, PAM120, PAM160, PAM250, or any derivatives thereof. An evolutionary model may also comprise the ITT model, the WAG model, the LG model, the R10 model, the INV model, or the Blosum models. A Blosum model may comprise Blosum45, Blosum62, Blosum80, or any derivatives thereof. In some embodiments, an evolutionary model may comprise computational constraints on the structure or function of the sequences. The constraints may be imposed by a computational model. The fitness of an evolutionary model may also be evaluated using the Aikake Information Criterion or the Bayesian Information Criterion. In some embodiments, a phylogenetic tree may be constructed once the evolutionary model and its fitness are calculated. In some embodiments, a phylogenetic tree may comprise maximum likelihood methods. A maximum likelihood method may comprise PhyML, MOLPHY, BioNJ, PHYLIP, or any derivatives thereof.

[0176] In some embodiments, an RT domain (e.g., an engineered RT) comprises an amino acid sequence that is at least about 50%, at least about 55%, at least about 60%, at least about 65%, at least about 70%, at least about 75%, at least about 80%, at least about 85%, at least about 86%, at least about 87%, at least about 88%, at least about 89%, at least about 90%, at least about 91%, at least about 92%, at least about 93%, at least about 94%, at least about 95%, at least about 96%, at least about 97%, at least about 98%, at least about 99% identical to any one of sequences selected from the group consisting of: SEQ ID NOs: 81-95. In some embodiments, an RT domain (e.g., an engineered RT) comprises an amino acid sequence that is at least about 50%, at least about 55%, at least about 60%, at least about 65%, at least about 70%, at least about 75%, at least about 80%, at least about 85%, at least about 86%, at least about 87%, at least about 88%, at least about 89%, at least about 90%, at least about 91%, at least about 92%, at least about 93%, at least about 94%, at least about 95%, at least about 96%, at least about 97%, at least about 98%, at least about 99% identical to any one of sequences selected from the group consisting of: SEQ ID NOs: 81, 82, 84, 91. In some embodiments, an RT domain (e.g., an engineered RT) comprises an amino acid sequence that has no more than 1, 2, 3, 4, 5, 6, 7, 8, 9, 10, 11, 12, 13, 14, 15, 16, 17, 18, 19, 20, 25, 30, 35, 40, ti, 45, or 50 differences e.g., mutations e g, amino acid deletions, amino acid substitutions, or amino acid substitutions compared to any of the amino acid sequences set forth in SEQ ID NO: 81-95. In some embodiments, an RT domain (e.g., an engineered RT) comprises an amino acid sequence that has no more than 1, 2, 3, 4, 5, 6, 7, 8, 9, 10, 11, 12, 13, 14, 15, 16, 17, 18, 19, 20, 25, 30, 35, 40, 45, or 50 differences e.g., mutations e.g., amino acid deletions, amino acid substitutions, or amino acid substitutions compared to any of the amino acid sequences set forth in SEQ ID NO: 81, 82, 84, 91. In some embodiments, the RT domain comprises an amino acid sequence that is selected from any one of sequences set forth in SEQ ID NOs: 81-95. In some embodiments, the RT domain comprises an amino acid sequence that is selected from any one of sequences set forth in SEQ ID NOs: 81, 82, 84, 91.

[0177] In some embodiments, a method of reverse transcribing a target RNA sequence may comprise contacting a target RNA sequence with an RT domain described herein. In some embodiments, the RT domain may reverse transcribe the RNA molecule into a complementary DNA sequence. In some embodiments, a cell may comprise the RT domains described herein.

[0178] In some embodiments, the RT domains described herein may comprise any SET domains described herein. In some embodiments, a composition may comprise the RT domains described herein. In some embodiments, a kit may also comprise the RT domains described herein.

[0179] The solubility of a prime editor in vitro may be measured by expressing the prime editor in bacteria as a recombinant protein, disrupting the bacteria, centrifugation the bacterial lysate into a supernatant and pellet. The amount of protein in these fractions may be visualized and quantified using western blotting. The amount of protein in the supernatant represents the soluble fraction, and the amount of protein in the pellet represents the insoluble fraction. The solubility of a prime editor in vivo may be measured by a split GFP assay as follows: A 15-amino-acid GFP fragment, GFP 11, is fused to the prime editor and expressed in a host cell. The GFP 1-10 detector fragment is expressed separately in the host cell. These fragments associate spontaneously to form fluorescent GFP if the prime editor comprising the GFP 11 fragment is soluble. The amount of GFP fluorescence of the host cell is proportional to the solubility of the prime editor in vivo. The expression level of a prime editor in vitro may be measured by expressing the prime editor in bacteria as a recombinant protein and lysing the bacteria. The amount of protein in the bacterial lysate may be visualized and quantified using western blotting. The expression level of a prime editor in vivo may be measured by expressing the prime editor in host cells and lysing the cells. The amount of protein in the cell lysate may be visualized and quantified using western blotting. The prime editing efficiency may be measured by the methods described in Examples 2-5 and. The DNA polymerase activity may be measured by conversion of radiolabeled deoxyribonucleoside triphosphate into an acid-insoluble product as follows: A DNA template primed with a primer is incubated with the radiolabeled deoxyribonucleoside triphosphates and a prime editor. The reaction is stopped by chilling and addition of perchloric acid. The acid-insoluble radioactivity is determined and is proportional to the DNA polymerase activity. The DNA-binding activity may be measured by an electrophoretic mobility shift assay. The DNA endonuclease activity may be measured by incubating a purified prime editor or a lysate of a cell expressing a prime editor with a cleavage target DNA; and measuring the cleavage product by agarose electrophoresis. Other methods or derivations of the methods described herein and known by a skilled in the art may also be used. The methods described herein may also be used to measure the solubility, expression level, DNA-binding activity, DNA endonuclease activity of any engineered RT described herein. The DNA polymerase may be used to measure the RT activity of any engineered RT described herein. For example, an oligo-dT primer may be used to prime an RNA template in a RT reaction to measure the RT activity.

Prime Editors with Solubility Enhancement (SET) Domains

[0180] A prime editor described herein may comprise additional functional domains, for example, one or more domains that modify the folding, solubility, or charge of the prime editor. In some embodiments, the prime editor may comprise a SET domain.

[0181] A SET domain may be associated, linked, or fused to any component of a prime editor (e.g., to a DNA polymerase domain and/or a DNA binding domain). In some embodiments, a SET domain is linked to a DNA-binding domain of a prime editor. In some embodiments, a SET domain is linked to a DNA polymerase domain of a prime editor. In some embodiments, where the prime editor is a fusion protein, the SET domain may be positioned at the N-terminus of the prime editor, the C-terminus of the prime editor, or in between a DNA binding domain and a polymerase domain.

[0182] In some embodiments, a SET domain may increase the solubility of a prime editor in vitro, relative to a prime editor without the SET domain. In some embodiments, the SET domain may increase the solubility of a prime editor in vivo, relative to a prime editor without the SET domain. The increase in solubility of a prime editor comprising the SET domain relative to a prime editor without the SET domain, in some embodiments, may be at least about 10%, at least about 15%, at least about 20%, at least about 25%, at least about 30%, at least about 35%, at least about 40%, at least about 45%, at least about 50%, at least about 55%, at least about 60%, at least about 65%, at least about 70%, at least about 75%, at least about 80%, at least about 85%, at least about 90%, at least about 95%, at least about 100%, at least about 105%, at least about 110%, at least about 115%, at least about 120%, at least about 125%, at least about 130%, at least about 135%, at least about 140%, at least about 145%, at least about 150%, at least about 155%, at least about 160%, at least about 165%, at least about 170%, at least about 175%, at least about 180%, at least about 185%, at least about 190%, at least about 195%, or at least about 200%. In some embodiments, the increase in solubility of a prime editor comprising the SET domain relative to a prime editor without the SET domain may be from 10 to 20%, from 15 to 25%, from 20 to 30%, from 25 to 35%, from 30 to 40%, from 35 to 45%, from 40 to 50%, from 45 to 55%, from 50 to 60%, from 55 to 65%, from 60 to 70%, from 65 to 75%, from 70 to 80%, from 75 to 85%, from 80 to 90%, from 85 to 95%, from 90 to 100%, from 95 to 105%, from 100 to 110%, from 105 to 115%, from 110 to 120%, from 115 to 125%, from 120 to 130%, from 125 to 135%, from 130 to 140%, from 135 to 145%, from 140 to 150%, from 145 to 155%, from 150 to 160%, from 155 to 165%, from 160 to 170%, from 165 to 175%, from 170 to 180%, from 175 to 185%, from 180 to 190%, from 185 to 195%, or from 190 to 200%. The increase in solubility of a prime editor comprising the SET domain relative to a prime editor without the SET domain, in some case, may be at least about at least about 1-fold, at least about 1.5-fold, at least about 2-fold, at least about 2.5-fold, at least about 3-fold, at least about 3.5-fold, at least about 4-fold, at least about 4.5-fold, at least about 5-fold, at least about 5.5-fold, at least about 6-fold, at least about 6.5-fold, at least about 7-fold, at least about 7.5-fold, at least about 8-fold, at least about 8.5-fold, at least about 9-fold, at least about 9.5-fold, at least about 10-fold, at least about 15-fold, at least about 20-fold, at least about 25-fold, at least about 30-fold, at least about 35-fold, at least about 40-fold, at least about 45-fold, or at least about 50-fold. In some embodiments, the increase in solubility of a prime editor comprising the SET domain relative to a prime editor without the SET domain may be from 1-fold to 2-fold, from 1.5-fold to 2.5-fold, from 2-fold to 3-fold, from 2.5-fold to 3.5-fold, from 3-fold to 4-fold, from 3.5-fold to 4.5-fold, from 4-fold to 5-fold, from 4.5-fold to 5.5-fold, from 5-fold to 6-fold, from 5.5-fold to 6.5-fold, from 6-fold to 7-fold, from 6.5-fold to 7.5-fold, from 7-fold to 8-fold, from 7.5-fold to 8.5-fold, from 8-fold to 9-fold, from 8.5-fold to 9.5-fold, from 9-fold to 10-fold, from 9.5-fold to 20-fold, from 15-fold to 25-fold, from 20-fold to 30-fold, from 25-fold to 35-fold, from 30-fold to 40-fold, from 35-fold to 45-fold, or from 40-fold to 50-fold.

[0183] In some embodiments, the SET domain may increase the expression level of a prime editor in vitro, relative to a prime editor without the SET domain. In some embodiments, the SET domain may increase the expression level of a prime editor in vivo, relative to a prime editor without the SET domain. The increase in expression level of a prime editor comprising the SET domain relative to a prime editor without the SET domain, in some embodiments, may be at least about 10%, at least about 15%, at least about 20%, at least about 25%, at least about 30%, at least about 35%, at least about 40%, at least about 45%, at least about 50%, at least about 55%, at least about 60%, at least about 65%, at least about 70%, at least about 75%, at least about 80%, at least about 85%, at least about 90%, at least about 95%, at least about 100%, at least about 105%, at least about 110%, at least about 115%, at least about 120%, at least about 125%, at least about 130%, at least about 135%, at least about 140%, at least about 145%, at least about 150%, at least about 155%, at least about 160%, at least about 165%, at least about 170%, at least about 175%, at least about 180%, at least about 185%, at least about 190%, at least about 195%, or at least about 200%. In some embodiments, the increase in expression level of a prime editor comprising the SET domain relative to a prime editor without the SET domain may be from 10 to 20%, from 15 to 25%, from 20 to 30%, from 25 to 35%, from 30 to 40%, from 35 to 45%, from 40 to 50%, from 45 to 55%, from 50 to 60%, from 55 to 65%, from 60 to 70%, from 65 to 75%, from 70 to 80%, from 75 to 85%, from 80 to 90%, from 85 to 95%, from 90 to 100%, from 95 to 105%, from 100 to 110%, from 105 to 115%, from 110 to 120%, from 115 to 125%, from 120 to 130%, from 125 to 135%, from 130 to 140%, from 135 to 145%, from 140 to 150%, from 145 to 155%, from 150 to 160%, from 155 to 165%, from 160 to 170%, from 165 to 175%, from 170 to 180%, from 175 to 185%, from 180 to 190%, from 185 to 195%, or from 190 to 200%. The increase in expression level of a prime editor comprising the SET domain relative to a prime editor without the SET domain, in some embodiments, may be at least about at least about 1-fold, at least about 1.5-fold, at least about 2-fold, at least about 2.5-fold, at least about 3-fold, at least about 3.5-fold, at least about 4-fold, at least about 4.5-fold, at least about 5-fold, at least about 5.5-fold, at least about 6-fold, at least about 6.5-fold, at least about 7-fold, at least about 7.5-fold, at least about 8-fold, at least about 8.5-fold, at least about 9-fold, at least about 9.5-fold, at least about 10-fold, at least about 15-fold, at least about 20-fold, at least about 25-fold, at least about 30-fold, at least about 35-fold, at least about 40-fold, at least about 45-fold, or at least about 50-fold. In some embodiments, the increase in expression level of a prime editor comprising the SET domain relative to a prime editor without the SET domain may be from 1-fold to 2-fold, from 1.5-fold to 2.5-fold, from 2-fold to 3-fold, from 2.5-fold to 3.5-fold, from 3-fold to 4-fold, from 3.5-fold to 4.5-fold, from 4-fold to 5-fold, from 4.5-fold to 5.5-fold, from 5-fold to 6-fold, from 5.5-fold to 6.5-fold, from 6-fold to 7-fold, from 6.5-fold to 7.5-fold, from 7-fold to 8-fold, from 7.5-fold to 8.5-fold, from 8-fold to 9-fold, from 8.5-fold to 9.5-fold, from 9-fold to 10-fold, from 9.5-fold to 20-fold, from 15-fold to 25-fold, from 20-fold to 30-fold, from 25-fold to 35-fold, from 30-fold to 40-fold, from 35-fold to 45-fold, or from 40-fold to 50-fold.

[0184] In some embodiments, a prime editor comprising the SET domain may increase prime editing efficiency, DNA polymerase activity, DNA-binding activity, or DNA endonuclease activity relative to a prime editor without the SET domain. The increase in the prime editing efficiency, DNA polymerase activity, DNA-binding activity, or DNA endonuclease activity of a prime editor comprising the SET domain relative to a prime editor without the SET domain, in some embodiments, may be at least about 10%, at least about 15%, at least about 20%, at least about 25%, at least about 30%, at least about 35%, at least about 40%, at least about 45%, at least about 50%, at least about 55%, at least about 60%, at least about 65%, at least about 70%, at least about 75%, at least about 80%, at least about 85%, at least about 90%, at least about 95%, at least about 100%, at least about 105%, at least about 110%, at least about 115%, at least about 120%, at least about 125%, at least about 130%, at least about 135%, at least about 140%, at least about 145%, at least about 150%, at least about 155%, at least about 160%, at least about 165%, at least about 170%, at least about 175%, at least about 180%, at least about 185%, at least about 190%, at least about 195%, or at least about 200%. In some embodiments, the increase in the prime editing efficiency, DNA polymerase activity, DNA-binding activity, or DNA endonuclease activity of a prime editor comprising the SET domain relative to a prime editor without the SET domain may be from 10 to 20%, from 15 to 25%, from 20 to 30%, from 25 to 35%, from 30 to 40%, from 35 to 45%, from 40 to 50%, from 45 to 55%, from 50 to 60%, from 55 to 65%, from 60 to 70%, from 65 to 75%, from 70 to 80%, from 75 to 85%, from 80 to 90%, from 85 to 95%, from 90 to 100%, from 95 to 105%, from 100 to 110%, from 105 to 115%, from 110 to 120%, from 115 to 125%, from 120 to 130%, from 125 to 135%, from 130 to 140%, from 135 to 145%, from 140 to 150%, from 145 to 155%, from 150 to 160%, from 155 to 165%, from 160 to 170%, from 165 to 175%, from 170 to 180%, from 175 to 185%, from 180 to 190%, from 185 to 195%, or from 190 to 200%. The increase in the prime editing efficiency, DNA polymerase activity, DNA-binding activity, or DNA endonuclease activity of a prime editor comprising the SET domain relative to a prime editor without the SET domain, in some embodiments, may be at least about at least about 1-fold, at least about 1.5-fold, at least about 2-fold, at least about 2.5-fold, at least about 3-fold, at least about 3.5-fold, at least about 4-fold, at least about 4.5-fold, at least about 5-fold, at least about 5.5-fold, at least about 6-fold, at least about 6.5-fold, at least about 7-fold, at least about 7.5-fold, at least about 8-fold, at least about 8.5-fold, at least about 9-fold, at least about 9.5-fold, at least about 10-fold, at least about 15-fold, at least about 20-fold, at least about 25-fold, at least about 30-fold, at least about 35-fold, at least about 40-fold, at least about 45-fold, or at least about 50-fold. In some embodiments, the increase in the prime editing efficiency, DNA polymerase activity, DNA-binding activity, or DNA endonuclease activity of a prime editor comprising the SET domain relative to a prime editor without the SET domain may be from 1-fold to 2-fold, from 1.5-fold to 2.5-fold, from 2-fold to 3-fold, from 2.5-fold to 3.5-fold, from 3-fold to 4-fold, from 3.5-fold to 4.5-fold, from 4-fold to 5-fold, from 4.5-fold to 5.5-fold, from 5-fold to 6-fold, from 5.5-fold to 6.5-fold, from 6-fold to 7-fold, from 6.5-fold to 7.5-fold, from 7-fold to 8-fold, from 7.5-fold to 8.5-fold, from 8-fold to 9-fold, from 8.5-fold to 9.5-fold, from 9-fold to 10-fold, from 9.5-fold to 20-fold, from 15-fold to 25-fold, from 20-fold to 30-fold, from 25-fold to 35-fold, from 30-fold to 40-fold, from 35-fold to 45-fold, or from 40-fold to 50-fold.

[0185] In some embodiments, a SET domain may adopt a secondary, tertiary, or quaternary structure when not fused to other components of the prime editor. In some embodiments, the SET domain may adopt a secondary structure without the prime editor. In some embodiments, the SET domain of a prime editor may adopt a tertiary structure without the prime editor. In some embodiments, the SET domain of a prime editor may adopt a quaternary structure without the prime editor. The SET domain of a prime editor adopting a secondary, tertiary, or quaternary structure without the prime editor may comprise any size described herein.

[0186] In some embodiments, the SET domain the SET domain of a prime editor may be less than about 100 kDa (kilo Dalton) or may adopt a secondary, tertiary, or quaternary structure without the prime editor. In some embodiments, the SET domain of a prime editor may be less than about 100 kDa. In some embodiments, the SET domain of a prime editor may be less than about 100 kDa and adopt a secondary, tertiary, or quaternary structure without the prime editor. In some embodiments, the SET domain of a prime editor may be less than about 50 kDa or may adopt a secondary, tertiary, or quaternary structure without the prime editor. In some embodiments, the SET domain of a prime editor may be less than about 50 kDa. In some embodiments, the SET domain of a prime editor may be less than about 50 kDa and adopt a secondary, tertiary, or quaternary structure without the prime editor.

[0187] In some embodiments, the SET domain of a prime editor may be less than about 20 kDa or may adopt a secondary, tertiary, or quaternary structure without the prime editor. In some embodiments, the SET domain of a prime editor may be less than about 20 kDa. In some embodiments, the SET domain of a prime editor may be less than about 20 kDa and adopt a secondary, tertiary, or quaternary structure without the prime editor. In some embodiments, the SET domain of a prime editor may be less than about 10 kDa or may adopt a secondary, tertiary, or quaternary structure without the prime editor. In some embodiments, the SET domain of a prime editor may be less than about 10 kDa. In some embodiments, the SET domain of a prime editor may be less than about 10 kDa and adopt a secondary, tertiary, or quaternary structure without the prime editor. In some embodiments, the SET domain of a prime editor may be less than about 9 kDa or may adopt a secondary, tertiary, or quaternary structure without the prime editor. In some embodiments, the SET domain of a prime editor may be less than about 9 kDa. In some embodiments, the SET domain of a prime editor may be less than about 9 kDa and adopt a secondary, tertiary, or quaternary structure without the prime editor. In some embodiments, the SET domain of a prime editor may be less than about 8 kDa or may adopt a secondary, tertiary, or quaternary structure without the prime editor. In some embodiments, the SET domain of a prime editor may be less than about 8 kDa. In some embodiments, the SET domain of a prime editor may be less than about 8 kDa and adopt a secondary, tertiary, or quaternary structure without the prime editor.

[0188] In some embodiments, the SET domain of a prime editor may be less than about 7 kDa or may adopt a secondary, tertiary, or quaternary structure without the prime editor. In some embodiments, the SET domain of a prime editor may be less than about 7 kDa. In some embodiments, the SET domain of a prime editor may be less than about 7 kDa and adopt a secondary, tertiary, or quaternary structure without the prime editor.

[0189] In some embodiments, the SET domain of a prime editor may be less than about 6 kDa or may adopt a secondary, tertiary, or quaternary structure without the prime editor. In some embodiments, the SET domain of a prime editor may be less than about 6 kDa. In some embodiments, the SET domain of a prime editor may be less than about 6 kDa and adopt a secondary, tertiary, or quaternary structure without the prime editor. In some embodiments, the SET domain of a prime editor may be less than about 5 kDa or may adopt a secondary, tertiary, or quaternary structure without the prime editor. In some embodiments, the SET domain of a prime editor may be less than about 5 kDa. In some embodiments, the SET domain of a prime editor may be less than about 5 kDa and adopt a secondary, tertiary, or quaternary structure without the prime editor.

[0190] In some embodiments, the SET domain of a prime editor may be less than about 95 kDa, less than about 90 kDa, less than about 85 kDa, less than about 80 kDa, less than about 75 kDa, less than about 70 kDa, less than about 65 kDa, 60 kDa, or less than about 55 kDa; or may adopt a secondary, tertiary, or quaternary structure without the prime editor. In some embodiments, the SET domain of a prime editor may be less than about 95 kDa, less than about 90 kDa, less than about 85 kDa, less than about 80 kDa, less than about 75 kDa, less than about 70 kDa, less than about 65 kDa, 60 kDa, or less than about 55 kDa. In some embodiments, the SET domain of a prime editor may be less than about 95 kDa, less than about 90 kDa, less than about 85 kDa, less than about 80 kDa, less than about 75 kDa, less than about 70 kDa, less than about 65 kDa, 60 kDa, or less than about 55 kDa; and adopt a secondary, tertiary, or quaternary structure without the prime editor. In some embodiments, the SET domain of a prime editor may be less than about 45 kDa, less than about 40 kDa, less than about 35 kDa, less than about 30 kDa; or may adopt a secondary, tertiary, or quaternary structure without the prime editor. In some embodiments, the SET domain of a prime editor may be less than about 45 kDa, less than about 40 kDa, less than about 35 kDa, less than about 30 kDa. In some embodiments, the SET domain of a prime editor may be less than about 45 kDa, less than about 40 kDa, less than about 35 kDa, less than about 30 kDa; and adopt a secondary, tertiary, or quaternary structure without the prime editor. In some embodiments, the SET domain of a prime editor may be less than about 11 kDa, less than about 12 kDa, less than about 13 kDa, less than about 14 kDa, less than about 15 kDa, less than about 16 kDa, less than about 17 kDa, less than about 18 kDa, or less than about 19 kDa; or may adopt a secondary, tertiary, or quaternary structure without the prime editor. In some embodiments, the SET domain of a prime editor may be less than about 11 kDa, less than about 12 kDa, less than about 13 kDa, less than about 14 kDa, less than about 15 kDa, less than about 16 kDa, less than about 17 kDa, less than about 18 kDa, or less than about 19 kDa. In some embodiments, the SET domain of a prime editor may be less than about 11 kDa, less than about 12 kDa, less than about 13 kDa, less than about 14 kDa, less than about 15 kDa, less than about 16 kDa, less than about 17 kDa, less than about 18 kDa, or less than about 19 kDa; and adopt a secondary, tertiary, or quaternary structure without the prime editor. In some embodiments, the SET domain of a prime editor may be less than about 4 kDa, less than about 3 kDa, less than about 2 kDa, or less than about 1 kDa; or may adopt a secondary, tertiary, or quaternary structure without the prime editor. In some embodiments, the SET domain of a prime editor may be less than about 4 kDa, less than about 3 kDa, less than about 2 kDa, or less than about 1 kDa. In some embodiments, the SET domain of a prime editor may be less than about 4 kDa, less than about 3 kDa, less than about 2 kDa, or less than about 1 kDa; and adopt a secondary, tertiary, or quaternary structure without the prime editor.

[0191] In some embodiments, the SET domain of a prime editor may comprise a GB1 domain, a protein D domain, a Z domain of Staphylococcal protein A, a Fhb domain, an MBP domain, a NusA domain, a Trx domain, a SUMO domain, a GST domain, a GB1 domain, a ZZ domain, a HaloTag domain, a SNUT domain, a Skp domain, a T7PK domain, an EspA domain, a Mocr domain, an Ecotin domain, a CaBP domain, an ArsC domain, an IF2-domain I domain, a RpoA domain, a SlyD domain, a Tsf domain, a RpoS domain, a PotD domain, a Crr domain, a msyB domain, an yjgD domain, a rpoD domain, a GFP domain, or a AK-tag domain. In some embodiments, the SET domain of a prime editor may comprise a protein D domain. In some embodiments, the SET domain of a prime editor may comprise a Z domain of Staphylococcal protein A. In some embodiments, the SET domain of a prime editor may comprise a Fhb domain. In some embodiments, the SET domain of a prime editor may comprise an MBP domain. In some embodiments, the SET domain of a prime editor may comprise a NusA domain. In some embodiments, the SET domain of a prime editor may comprise, a Trx domain. In some embodiments, the SET domain of a prime editor may comprise a SUMO domain. In some embodiments, the SET domain of a prime editor may comprise a GST domain. In some embodiments, the SET domain of a prime editor may comprise a GB1 domain. In some embodiments, the SET domain of a prime editor may comprise a ZZ domain. In some embodiments, the SET domain of a prime editor may comprise a HaloTag domain. In some embodiments, the SET domain of a prime editor may comprise a SNUT domain. In some embodiments, the SET domain of a prime editor may comprise a Skp domain. In some embodiments, the SET domain of a prime editor may comprise a T7PK domain. In some embodiments, the SET domain of a prime editor may comprise an EspA domain. In some embodiments, the SET domain of a prime editor may comprise a Mocr domain. In some embodiments, the SET domain of a prime editor may comprise an Ecotin domain. In some embodiments, the SET domain of a prime editor may comprise a CaBP domain. In some embodiments, the SET domain of a prime editor may comprise an ArsC domain. In some embodiments, the SET domain of a prime editor may comprise an IF2-domain I domain. In some embodiments, the SET domain of a prime editor may comprise a RpoA domain. In some embodiments, the SET domain of a prime editor may comprise a SlyD domain. In some embodiments, the SET domain of a prime editor may comprise a Tsf domain. In some embodiments, the SET domain of a prime editor may comprise a RpoS domain. In some embodiments, the SET domain of a prime editor may comprise a PotD domain. In some embodiments, the SET domain of a prime editor may comprise a Crr domain. In some embodiments, the SET domain of a prime editor may comprise a msyB domain. In some embodiments, the SET domain of a prime editor may comprise an yjgD domain. In some embodiments, the SET domain of a prime editor may comprise a rpoD domain. In some embodiments, the SET domain of a prime editor may comprise a GFP domain. In some embodiments, the SET domain of a prime editor may comprise an AK-tag domain.

[0192] In some embodiments, a SET domain of a prime editor comprises an amino acid sequence that is at least about 50%, at least about 55%, at least about 60%, at least about 65%, at least about 70%, at least about 75%, at least about 80%, at least about 85%, at least about 86%, at least about 87%, at least about 88%, at least about 89%, at least about 90%, at least about 91%, at least about 92%, at least about 93%, at least about 94%, at least about 95%, at least about 96%, at least about 97%, at least about 98%, at least about 99% identical to a sequence selected from the group consisting of: SEQ ID NOs: 96-124 or 137. In some embodiments, a SET domain (e.g., an engineered RT) comprises an amino acid sequence that has no more than 1, 2, 3, 4, 5, 6, 7, 8, 9, 10, 11, 12, 13, 14, 15, 16, 17, 18, 19, 20, 25, 30, 35, 40, 45, or 50 differences e.g., mutations e.g., deletions or substitutions compared to any of the ammo acid sequences set forth in SEQ ID NO: 96-124 or 137. In some embodiments, a SET domain of a prime editor comprises an amino acid sequence that is selected from the group consisting of: SEQ ID NOs: 96-124 or 137. In some embodiments, the SET domain comprises an amino acid sequence that is at least about 50%, at least about 55%, at least about 60%, at least about 65%, at least about 70%, at least about 75%, at least about 80%, at least about 85%, at least about 86%, at least about 87%, at least about 88%, at least about 89%, at least about 90%, at least about 91%, at least about 92%, at least about 93%, at least about 94%, at least about 95%, at least about 96%, at least about 97%, at least about 98%, at least about 99% identical to a sequence selected from the group consisting of: SEQ ID NO: 102 and SEQ ID NO: 137. In some embodiments, a SET domain (e.g., an engineered RT) comprises an amino acid sequence that has no more than 1, 2, 3, 4, 5, 6, 7, 8, 9, 10, 11, 12, 13, 14, 15, 16, 17, 18, 19, 20, 25, 30, 35, 40, 45, or 50 differences e.g., mutations e.g., deletions or substitutions compared to any of the amino acid sequences set forth in SEQ ID NO: 102 and SEQ ID NO: 137. In some embodiments, a SET domain of a prime editor comprises an amino acid sequence selected from the group consisting of: SEQ ID NO: 102 and SEQ ID NO: 137. In some embodiments, the SET domain comprises an amino acid sequence that is at least about 50%, at least about 55%, at least about 60%, at least about 65%, at least about 70%, at least about 75%, at least about 80%, at least about 85%, at least about 86%, at least about 87%, at least about 88%, at least about 89%, at least about 90%, at least about 91%, at least about 92%, at least about 93%, at least about 94%, at least about 95%, at least about 96%, at least about 97%, at least about 98%, at least about 99% identical to a sequence set forth in SEQ ID NO: 102. In some embodiments, a SET domain (e.g., an engineered RT) comprises an amino acid sequence that has no more than 1, 2, 3, 4, 5, 6, 7, 8, 9, 10, 11, 12, 13, 14, 15, 16, 17, 18, 19, 20, 25, 30, 35, 40, 45, or 50 differences e.g., mutations e.g., deletions or substitutions compared to an amino acid sequences set forth in SEQ ID NO: 102. In some embodiments, a SET domain of a prime editor comprises an amino acid sequence set forth at SEQ ID NO: 102. In some embodiments, the SET domain comprises an amino acid sequence that is at least about 50%, at least about 55%, at least about 60%, at least about 65%, at least about 70%, at least about 75%, at least about 80%, at least about 85%, at least about 86%, at least about 87%, at least about 88%, at least about 89%, at least about 90%, at least about 91%, at least about 92%, at least about 93%, at least about 94%, at least about 95%, at least about 96%, at least about 97%, at least about 98%, at least about 99% identical to a sequence set forth in SEQ ID NO: 137. In some embodiments, a SET domain (e.g., an engineered RT) comprises an amino acid sequence that has no more than 1, 2, 3, 4, 5, 6, 7, 8, 9, 10, 11, 12, 13, 14, 15, 16, 17, 18, 19, 20, 25, 30, 35, 40, 45, or 50 differences e.g., mutations e.g., deletions or substitutions compared to an amino acid sequences set forth in SEQ ID NO: 137. In some embodiments, a SET domain of a prime editor comprises an amino acid sequence set forth at SEQ ID NO: 137.

[0193] In some embodiments, a prime editor comprising a SET domain of comprises an amino acid sequence that is at least about 50%, at least about 55%, at least about 60%, at least about 65%, at least about 70%, at least about 75%, at least about 80%, at least about 85%, at least about 86%, at least about 87%, at least about 88%, at least about 89%, at least about 90%, at least about 91%, at least about 92%, at least about 93%, at least about 94%, at least about 95%, at least about 96%, at least about 97%, at least about 98%, at least about 99% identical to a sequence selected from the group consisting of: SEQ ID NOs: 125-128. In some embodiments, a prime editor comprising a SET domain comprises an amino acid sequence that has no more than 1, 2, 3, 4, 5, 6, 7, 8, 9, 10, 11, 12, 13, 14, 15, 16, 17, 18, 19, 20, 25, 30, 35, 40, 45, or 50 differences e.g., mutations e.g., deletions or substitutions compared to any of the amino acid sequences set forth in SEQ ID NO: 125-128. In some embodiments, a prime editor comprising a SET domain of a prime editor comprises an amino acid sequence that is selected from the group consisting of: SEQ ID NOs: 125-128.

[0194] In some embodiments, a SET domain may increase the solubility, the expression level, the prime editing efficiency, the DNA polymerase activity, the DNA-binding activity, or the DNA endonuclease activity of a prime editor, relative to a prime editor lacking the SET domain. In some embodiments, a SET domain may increase the solubility, the expression level, the prime editing efficiency, the DNA polymerase activity, the DNA-binding activity, or the DNA endonuclease activity of a prime editor, relative to a prime editor lacking the SET domain. In some embodiments, a SET domain may increase the solubility of a prime editor, relative to a prime editor lacking the SET domain. In some embodiments, a SET domain may increase the expression level of a prime editor, relative to a prime editor lacking the SET domain. In some embodiments, a SET domain may increase the prime editing efficiency of a prime editor, relative to a prime editor lacking the SET domain. In some embodiments, a SET domain may increase the DNA polymerase activity of a prime editor, relative to a prime editor lacking the SET domain. In some embodiments, a SET domain may increase the DNA-binding activity of a prime editor, relative to a prime editor lacking the SET domain. In some embodiments, a SET domain may increase the DNA endonuclease activity of a prime editor, relative to a prime editor lacking the SET domain.

[0195] In some embodiments, a SET domain may increase the solubility of a prime editor in vitro, relative to a prime editor lacking the SET domain. In some embodiments, a SET domain may increase the solubility of a prime editor in vivo, relative to a prime editor lacking the SET domain. The increase in solubility of a prime editor comprising a SET domain relative to a prime editor lacking the SET domain, in some embodiments, may be at least about 10%, at least about 15%, at least about 20%, at least about 25%, at least about 30%, at least about 35%, at least about 40%, at least about 45%, at least about 50%, at least about 55%, at least about 60%, at least about 65%, at least about 70%, at least about 75%, at least about 80%, at least about 85%, at least about 90%, at least about 95%, at least about 100%, at least about 105%, at least about 110%, at least about 115%, at least about 120%, at least about 125%, at least about 130%, at least about 135%, at least about 140%, at least about 145%, at least about 150%, at least about 155%, at least about 160%, at least about 165%, at least about 170%, at least about 175%, at least about 180%, at least about 185%, at least about 190%, at least about 195%, or at least about 200%. In some embodiments, the increase in solubility of a prime editor comprising a SET domain relative to a prime editor lacking the SET domain may be from 10 to 20%, from 15 to 25%, from 20 to 30%, from 25 to 35%, from 30 to 40%, from 35 to 45%, from 40 to 50%, from 45 to 55%, from 50 to 60%, from 55 to 65%, from 60 to 70%, from 65 to 75%, from 70 to 80%, from 75 to 85%, from 80 to 90%, from 85 to 95%, from 90 to 100%, from 95 to 105%, from 100 to 110%, from 105 to 115%, from 110 to 120%, from 115 to 125%, from 120 to 130%, from 125 to 135%, from 130 to 140%, from 135 to 145%, from 140 to 150%, from 145 to 155%, from 150 to 160%, from 155 to 165%, from 160 to 170%, from 165 to 175%, from 170 to 180%, from 175 to 185%, from 180 to 190%, from 185 to 195%, or from 190 to 200%. The increase in solubility of a prime editor comprising a SET domain relative to a prime editor lacking the SET domain, in some embodiments, may be at least about at least about 1-fold, at least about 1.5-fold, at least about 2-fold, at least about 2.5-fold, at least about 3-fold, at least about 3.5-fold, at least about 4-fold, at least about 4.5-fold, at least about 5-fold, at least about 5.5-fold, at least about 6-fold, at least about 6.5-fold, at least about 7-fold, at least about 7.5-fold, at least about 8-fold, at least about 8.5-fold, at least about 9-fold, at least about 9.5-fold, at least about 10-fold, at least about 15-fold, at least about 20-fold, at least about 25-fold, at least about 30-fold, at least about 35-fold, at least about 40-fold, at least about 45-fold, or at least about 50-fold. In some embodiments, the increase in solubility of a prime editor comprising a SET domain relative to a prime editor lacking the SET domain may be from 1-fold to 2-fold, from 1.5-fold to 2.5-fold, from 2-fold to 3-fold, from 2.5-fold to 3.5-fold, from 3-fold to 4-fold, from 3.5-fold to 4.5-fold, from 4-fold to 5-fold, from 4.5-fold to 5.5-fold, from 5-fold to 6-fold, from 5.5-fold to 6.5-fold, from 6-fold to 7-fold, from 6.5-fold to 7.5-fold, from 7-fold to 8-fold, from 7.5-fold to 8.5-fold, from 8-fold to 9-fold, from 8.5-fold to 9.5-fold, from 9-fold to 10-fold, from 9.5-fold to 20-fold, from 15-fold to 25-fold, from 20-fold to 30-fold, from 25-fold to 35-fold, from 30-fold to 40-fold, from 35-fold to 45-fold, or from 40-fold to 50-fold.

[0196] In some embodiments, a SET domain may increase the expression level of a prime editor in vitro, relative to a prime editor lacking the SET domain. In some embodiments, a SET domain may increase the expression level of a prime editor in vivo, relative to a prime editor lacking the SET domain. The increase in expression level of a prime editor comprising a SET domain relative to a prime editor lacking the SET domain, in some case, may be at least about 10%, at least about 15%, at least about 20%, at least about 25%, at least about 30%, at least about 35%, at least about 40%, at least about 45%, at least about 50%, at least about 55%, at least about 60%, at least about 65%, at least about 70%, at least about 75%, at least about 80%, at least about 85%, at least about 90%, at least about 95%, at least about 100%, at least about 105%, at least about 110%, at least about 115%, at least about 120%, at least about 125%, at least about 130%, at least about 135%, at least about 140%, at least about 145%, at least about 150%, at least about 155%, at least about 160%, at least about 165%, at least about 170%, at least about 175%, at least about 180%, at least about 185%, at least about 190%, at least about 195%, or at least about 200%. In some embodiments, the increase in expression level of a prime editor comprising a SET domain relative to a prime editor lacking the SET domain may be from 10 to 20%, from 15 to 25%, from 20 to 30%, from 25 to 35%, from 30 to 40%, from 35 to 45%, from 40 to 50%, from 45 to 55%, from 50 to 60%, from 55 to 65%, from 60 to 70%, from 65 to 75%, from 70 to 80%, from 75 to 85%, from 80 to 90%, from 85 to 95%, from 90 to 100%, from 95 to 105%, from 100 to 110%, from 105 to 115%, from 110 to 120%, from 115 to 125%, from 120 to 130%, from 125 to 135%, from 130 to 140%, from 135 to 145%, from 140 to 150%, from 145 to 155%, from 150 to 160%, from 155 to 165%, from 160 to 170%, from 165 to 175%, from 170 to 180%, from 175 to 185%, from 180 to 190%, from 185 to 195%, or from 190 to 200%. The increase in expression level of a prime editor comprising a SET domain relative to a prime editor lacking the SET domain, in some embodiments, may be at least about at least about 1-fold, at least about 1.5-fold, at least about 2-fold, at least about 2.5-fold, at least about 3-fold, at least about 3.5-fold, at least about 4-fold, at least about 4.5-fold, at least about 5-fold, at least about 5.5-fold, at least about 6-fold, at least about 6.5-fold, at least about 7-fold, at least about 7.5-fold, at least about 8-fold, at least about 8.5-fold, at least about 9-fold, at least about 9.5-fold, at least about 10-fold, at least about 15-fold, at least about 20-fold, at least about 25-fold, at least about 30-fold, at least about 35-fold, at least about 40-fold, at least about 45-fold, or at least about 50-fold. In some embodiments, the increase in expression level of a prime editor comprising a SET domain relative to a prime editor lacking the SET domain may be from 1-fold to 2-fold, from 1.5-fold to 2.5-fold, from 2-fold to 3-fold, from 2.5-fold to 3.5-fold, from 3-fold to 4-fold, from 3.5-fold to 4.5-fold, from 4-fold to 5-fold, from 4.5-fold to 5.5-fold, from 5-fold to 6-fold, from 5.5-fold to 6.5-fold, from 6-fold to 7-fold, from 6.5-fold to 7.5-fold, from 7-fold to 8-fold, from 7.5-fold to 8.5-fold, from 8-fold to 9-fold, from 8.5-fold to 9.5-fold, from 9-fold to 10-fold, from 9.5-fold to 20-fold, from 15-fold to 25-fold, from 20-fold to 30-fold, from 25-fold to 35-fold, from 30-fold to 40-fold, from 35-fold to 45-fold, or from 40-fold to 50-fold.

[0197] The increase in the prime editing efficiency, DNA polymerase activity, DNA-binding activity, or DNA endonuclease activity of a prime editor comprising a SET domain relative to a prime editor lacking the SET domain, in some case, may be at least about 10%, at least about 15%, at least about 20%, at least about 25%, at least about 30%, at least about 35%, at least about 40%, at least about 45%, at least about 50%, at least about 55%, at least about 60%, at least about 65%, at least about 70%, at least about 75%, at least about 80%, at least about 85%, at least about 90%, at least about 95%, at least about 100%, at least about 105%, at least about 110%, at least about 115%, at least about 120%, at least about 125%, at least about 130%, at least about 135%, at least about 140%, at least about 145%, at least about 150%, at least about 155%, at least about 160%, at least about 165%, at least about 170%, at least about 175%, at least about 180%, at least about 185%, at least about 190%, at least about 195%, or at least about 200%. In some embodiments, the increase in the prime editing efficiency, DNA polymerase activity, DNA-binding activity, or DNA endonuclease activity of a prime editor comprising a SET domain relative to a prime editor lacking the SET domain may be from 10 to 20%, from 15 to 25%, from 20 to 30%, from 25 to 35%, from 30 to 40%, from 35 to 45%, from 40 to 50%, from 45 to 55%, from 50 to 60%, from 55 to 65%, from 60 to 70%, from 65 to 75%, from 70 to 80%, from 75 to 85%, from 80 to 90%, from 85 to 95%, from 90 to 100%, from 95 to 105%, from 100 to 110%, from 105 to 115%, from 110 to 120%, from 115 to 125%, from 120 to 130%, from 125 to 135%, from 130 to 140%, from 135 to 145%, from 140 to 150%, from 145 to 155%, from 150 to 160%, from 155 to 165%, from 160 to 170%, from 165 to 175%, from 170 to 180%, from 175 to 185%, from 180 to 190%, from 185 to 195%, or from 190 to 200%. The increase in the prime editing efficiency, DNA polymerase activity, DNA-binding activity, or DNA endonuclease activity of a prime editor comprising a SET domain relative to a prime editor lacking the SET domain, in some embodiments, may be at least about at least about 1-fold, at least about 1.5-fold, at least about 2-fold, at least about 2.5-fold, at least about 3-fold, at least about 3.5-fold, at least about 4-fold, at least about 4.5-fold, at least about 5-fold, at least about 5.5-fold, at least about 6-fold, at least about 6.5-fold, at least about 7-fold, at least about 7.5-fold, at least about 8-fold, at least about 8.5-fold, at least about 9-fold, at least about 9.5-fold, at least about 10-fold, at least about 15-fold, at least about 20-fold, at least about 25-fold, at least about 30-fold, at least about 35-fold, at least about 40-fold, at least about 45-fold, or at least about 50-fold. In some embodiments, the increase in the prime editing efficiency, DNA polymerase activity, DNA-binding activity, or DNA endonuclease activity of a prime editor comprising a SET domain relative to a prime editor lacking the SET domain may be from 1-fold to 2-fold, from 1.5-fold to 2.5-fold, from 2-fold to 3-fold, from 2.5-fold to 3.5-fold, from 3-fold to 4-fold, from 3.5-fold to 4.5-fold, from 4-fold to 5-fold, from 4.5-fold to 5.5-fold, from 5-fold to 6-fold, from 5.5-fold to 6.5-fold, from 6-fold to 7-fold, from 6.5-fold to 7.5-fold, from 7-fold to 8-fold, from 7.5-fold to 8.5-fold, from 8-fold to 9-fold, from 8.5-fold to 9.5-fold, from 9-fold to 10-fold, from 9.5-fold to 20-fold, from 15-fold to 25-fold, from 20-fold to 30-fold, from 25-fold to 35-fold, from 30-fold to 40-fold, from 35-fold to 45-fold, or from 40-fold to 50-fold.

[0198] In some embodiments, a SET domain of a prime editor may comprise a GB1 domain, a protein D domain, a Z domain of Staphylococcal protein A, a Fh8 domain, an MBP domain, a NusA domain, a Trx domain, a SUMO domain, a GST domain, a GB1 domain, a ZZ domain, a HaloTag domain, a SNUT domain, a Skp domain, a T7PK domain, an EspA domain, a Mocr domain, an Ecotin domain, a CaBP domain, an ArsC domain, an IF2-domain I domain, a RpoA domain, a SlyD domain, a Tsf domain, a RpoS domain, a PotD domain, a Crr domain, a msyB domain, an yjgD domain, a rpoD domain, a GFP domain, or a AK-tag domain. In some embodiments, a SET domain of a prime editor may comprise a protein D domain. In some embodiments, a SET domain of a prime editor may comprise a Z domain of Staphylococcal protein A. In some embodiments, a SET domain of a prime editor may comprise a Fh8 domain. In some embodiments, a SET domain of a prime editor may comprise an MBP domain. In some embodiments, a SET domain of a prime editor may comprise a NusA domain. In some embodiments, a SET domain of a prime editor may comprise, a Trx domain. In some embodiments, a SET domain of a prime editor may comprise a SUMO domain. In some embodiments, a SET domain of a prime editor may comprise a GST domain. In some embodiments, a SET domain of a prime editor may comprise a GB1 domain. In some embodiments, a SET domain of a prime editor may comprise a ZZ domain. In some embodiments, a SET domain of a prime editor may comprise a HaloTag domain. In some embodiments, a SET domain of a prime editor may comprise a SNUT domain. In some embodiments, a SET domain of a prime editor may comprise a Skp domain. In some embodiments, a SET domain of a prime editor may comprise a T7PK domain. In some embodiments, a SET domain of a prime editor may comprise an EspA domain. In some embodiments, a SET domain of a prime editor may comprise a Mocr domain. In some embodiments, a SET domain of a prime editor may comprise an Ecotin domain. In some embodiments, a SET domain of a prime editor may comprise a CaBP domain. In some embodiments, a SET domain of a prime editor may comprise an ArsC domain. In some embodiments, a SET domain of a prime editor may comprise an IF2-domain I domain. In some embodiments, a SET domain of a prime editor may comprise a RpoA domain. In some embodiments, a SET domain of a prime editor may comprise a SlyD domain. In some embodiments, a SET domain of a prime editor may comprise a Tsf domain. In some embodiments, a SET domain of a prime editor may comprise a RpoS domain. In some embodiments, a SET domain of a prime editor may comprise a PotD domain. In some embodiments, a SET domain of a prime editor may comprise a Crr domain. In some embodiments, a SET domain of a prime editor may comprise a msyB domain. In some embodiments, a SET domain of a prime editor may comprise an yjgD domain. In some embodiments, a SET domain of a prime editor may comprise a rpoD domain. In some embodiments, a SET domain of a prime editor may comprise a GFP domain. In some embodiments, a SET domain of a prime editor may comprise an AK-tag domain.

[0199] In some embodiments, the SET domain of a prime editor comprises a GB1 domain. In some embodiments, the SET domain of a prime editor comprises a GB1 domain. In some embodiments, a GB1 domain may increase the solubility, the expression level, the prime editing efficiency, the DNA polymerase activity, the DNA-binding activity, or the DNA endonuclease activity of a prime editor, relative to a prime editor lacking the GB1 domain. In some embodiments, a GB1 domain may increase the solubility of a prime editor, relative to a prime editor lacking the SET domain. In some embodiments, a GB1 domain may increase the expression level of a prime editor, relative to a prime editor lacking the SET domain. In some embodiments, a GB1 domain may increase the prime editing efficiency of a prime editor, relative to a prime editor lacking the SET domain. In some embodiments, a GB1 domain may increase the DNA polymerase activity of a prime editor, relative to a prime editor lacking the SET domain. In some embodiments, a GB1 domain may increase the DNA-binding activity of a prime editor, relative to a prime editor lacking the SET domain. In some embodiments, a GB1 domain may increase the DNA endonuclease activity of a prime editor, relative to a prime editor lacking the SET domain.

[0200] In some embodiments, a GB1 domain may increase the solubility of a prime editor in vitro, relative to a prime editor lacking the GB1 domain. In some embodiments, a GB1 domain may increase the solubility of a prime editor in vivo, relative to a prime editor lacking the GB1 domain. The increase in solubility of a prime editor comprising a GB1 domain relative to a prime editor lacking the GB1 domain, in some case, may be at least about 10%, at least about 15%, at least about 20%, at least about 25%, at least about 30%, at least about 35%, at least about 40%, at least about 45%, at least about 50%, at least about 55%, at least about 60%, at least about 65%, at least about 70%, at least about 75%, at least about 80%, at least about 85%, at least about 90%, at least about 95%, at least about 100%, at least about 105%, at least about 110%, at least about 115%, at least about 120%, at least about 125%, at least about 130%, at least about 135%, at least about 140%, at least about 145%, at least about 150%, at least about 155%, at least about 160%, at least about 165%, at least about 170%, at least about 175%, at least about 180%, at least about 185%, at least about 190%, at least about 195%, or at least about 200%. In some embodiments, the increase in solubility of a prime editor comprising a GB1 domain relative to a prime editor lacking the GB1 domain may be from 10 to 20%, from 15 to 25%, from 20 to 30%, from 25 to 35%, from 30 to 40%, from 35 to 45%, from 40 to 50%, from 45 to 55%, from 50 to 60%, from 55 to 65%, from 60 to 70%, from 65 to 75%, from 70 to 80%, from 75 to 85%, from 80 to 90%, from 85 to 95%, from 90 to 100%, from 95 to 105%, from 100 to 110%, from 105 to 115%, from 110 to 120%, from 115 to 125%, from 120 to 130%, from 125 to 135%, from 130 to 140%, from 135 to 145%, from 140 to 150%, from 145 to 155%, from 150 to 160%, from 155 to 165%, from 160 to 170%, from 165 to 175%, from 170 to 180%, from 175 to 185%, from 180 to 190%, from 185 to 195%, or from 190 to 200%. The increase in solubility of a prime editor comprising a GB1 domain relative to a prime editor lacking the GB1 domain, in some case, may be at least about at least about 1-fold, at least about 1.5-fold, at least about 2-fold, at least about 2.5-fold, at least about 3-fold, at least about 3.5-fold, at least about 4-fold, at least about 4.5-fold, at least about 5-fold, at least about 5.5-fold, at least about 6-fold, at least about 6.5-fold, at least about 7-fold, at least about 7.5-fold, at least about 8-fold, at least about 8.5-fold, at least about 9-fold, at least about 9.5-fold, at least about 10-fold, at least about 15-fold, at least about 20-fold, at least about 25-fold, at least about 30-fold, at least about 35-fold, at least about 40-fold, at least about 45-fold, or at least about 50-fold. In some embodiments, the increase in solubility of a prime editor comprising a GB1 domain relative to a prime editor lacking the GB1 domain may be from 1-fold to 2-fold, from 1.5-fold to 2.5-fold, from 2-fold to 3-fold, from 2.5-fold to 3.5-fold, from 3-fold to 4-fold, from 3.5-fold to 4.5-fold, from 4-fold to 5-fold, from 4.5-fold to 5.5-fold, from 5-fold to 6-fold, from 5.5-fold to 6.5-fold, from 6-fold to 7-fold, from 6.5-fold to 7.5-fold, from 7-fold to 8-fold, from 7.5-fold to 8.5-fold, from 8-fold to 9-fold, from 8.5-fold to 9.5-fold, from 9-fold to 10-fold, from 9.5-fold to 20-fold, from 15-fold to 25-fold, from 20-fold to 30-fold, from 25-fold to 35-fold, from 30-fold to 40-fold, from 35-fold to 45-fold, or from 40-fold to 50-fold.

[0201] In some embodiments, a GB1 domain may increase the expression level of a prime editor in vitro, relative to a prime editor lacking the GB1 domain. In some embodiments, a GB1 domain may increase the expression level of a prime editor in vivo, relative to a prime editor lacking the GB1 domain. The increase in expression level of a prime editor comprising a GB1 domain relative to a prime editor lacking the GB1 domain, in some case, may be at least about 10%, at least about 15%, at least about 20%, at least about 25%, at least about 30%, at least about 35%, at least about 40%, at least about 45%, at least about 50%, at least about 55%, at least about 60%, at least about 65%, at least about 70%, at least about 75%, at least about 80%, at least about 85%, at least about 90%, at least about 95%, at least about 100%, at least about 105%, at least about 110%, at least about 115%, at least about 120%, at least about 125%, at least about 130%, at least about 135%, at least about 140%, at least about 145%, at least about 150%, at least about 155%, at least about 160%, at least about 165%, at least about 170%, at least about 175%, at least about 180%, at least about 185%, at least about 190%, at least about 195%, or at least about 200%. In some embodiments, the increase in expression level of a prime editor comprising a GB1 domain relative to a prime editor lacking the GB1 domain may be from 10 to 20%, from 15 to 25%, from 20 to 30%, from 25 to 35%, from 30 to 40%, from 35 to 45%, from 40 to 50%, from 45 to 55%, from 50 to 60%, from 55 to 65%, from 60 to 70%, from 65 to 75%, from 70 to 80%, from 75 to 85%, from 80 to 90%, from 85 to 95%, from 90 to 100%, from 95 to 105%, from 100 to 110%, from 105 to 115%, from 110 to 120%, from 115 to 125%, from 120 to 130%, from 125 to 135%, from 130 to 140%, from 135 to 145%, from 140 to 150%, from 145 to 155%, from 150 to 160%, from 155 to 165%, from 160 to 170%, from 165 to 175%, from 170 to 180%, from 175 to 185%, from 180 to 190%, from 185 to 195%, or from 190 to 200%. The increase in expression level of a prime editor comprising a GB1 domain relative to a prime editor lacking the GB1 domain, in some case, may be at least about at least about 1-fold, at least about 1.5-fold, at least about 2-fold, at least about 2.5-fold, at least about 3-fold, at least about 3.5-fold, at least about 4-fold, at least about 4.5-fold, at least about 5-fold, at least about 5.5-fold, at least about 6-fold, at least about 6.5-fold, at least about 7-fold, at least about 7.5-fold, at least about 8-fold, at least about 8.5-fold, at least about 9-fold, at least about 9.5-fold, at least about 10-fold, at least about 15-fold, at least about 20-fold, at least about 25-fold, at least about 30-fold, at least about 35-fold, at least about 40-fold, at least about 45-fold, or at least about 50-fold. In some embodiments, the increase in expression level of a prime editor comprising a GB1 domain relative to a prime editor lacking the GB1 domain may be from 1-fold to 2-fold, from 1.5-fold to 2.5-fold, from 2-fold to 3-fold, from 2.5-fold to 3.5-fold, from 3-fold to 4-fold, from 3.5-fold to 4.5-fold, from 4-fold to 5-fold, from 4.5-fold to 5.5-fold, from 5-fold to 6-fold, from 5.5-fold to 6.5-fold, from 6-fold to 7-fold, from 6.5-fold to 7.5-fold, from 7-fold to 8-fold, from 7.5-fold to 8.5-fold, from 8-fold to 9-fold, from 8.5-fold to 9.5-fold, from 9-fold to 10-fold, from 9.5-fold to 20-fold, from 15-fold to 25-fold, from 20-fold to 30-fold, from 25-fold to 35-fold, from 30-fold to 40-fold, from 35-fold to 45-fold, or from 40-fold to 50-fold.

[0202] In some embodiments, a GB1 domain may have an increased prime editing efficiency, DNA polymerase activity, DNA-binding activity, or DNA endonuclease activity of a prime editor comprising a GB1 domain relative to a prime editor lacking the GB1 domain. The increase in the prime editing efficiency, DNA polymerase activity, DNA-binding activity, or DNA endonuclease activity of a prime editor comprising a GB1 domain relative to a prime editor lacking the GB1 domain, in some case, may be at least about 10%, at least about 15%, at least about 20%, at least about 25%, at least about 30%, at least about 35%, at least about 40%, at least about 45%, at least about 50%, at least about 55%, at least about 60%, at least about 65%, at least about 70%, at least about 75%, at least about 80%, at least about 85%, at least about 90%, at least about 95%, at least about 100%, at least about 105%, at least about 110%, at least about 115%, at least about 120%, at least about 125%, at least about 130%, at least about 135%, at least about 140%, at least about 145%, at least about 150%, at least about 155%, at least about 160%, at least about 165%, at least about 170%, at least about 175%, at least about 180%, at least about 185%, at least about 190%, at least about 195%, or at least about 200%. In some embodiments, the increase in the prime editing efficiency, DNA polymerase activity, DNA-binding activity, or DNA endonuclease activity of a prime editor comprising a GB1 domain relative to a prime editor lacking the GB1 domain may be from 10 to 20%, from 15 to 25%, from 20 to 30%, from 25 to 35%, from 30 to 40%, from 35 to 45%, from 40 to 50%, from 45 to 55%, from 50 to 60%, from 55 to 65%, from 60 to 70%, from 65 to 75%, from 70 to 80%, from 75 to 85%, from 80 to 90%, from 85 to 95%, from 90 to 100%, from 95 to 105%, from 100 to 110%, from 105 to 115%, from 110 to 120%, from 115 to 125%, from 120 to 130%, from 125 to 135%, from 130 to 140%, from 135 to 145%, from 140 to 150%, from 145 to 155%, from 150 to 160%, from 155 to 165%, from 160 to 170%, from 165 to 175%, from 170 to 180%, from 175 to 185%, from 180 to 190%, from 185 to 195%, or from 190 to 200%. The increase in the prime editing efficiency, DNA polymerase activity, DNA-binding activity, or DNA endonuclease activity of a prime editor comprising a GB1 domain relative to a prime editor lacking the GB1 domain, in some case, may be at least about at least about 1-fold, at least about 1.5-fold, at least about 2-fold, at least about 2.5-fold, at least about 3-fold, at least about 3.5-fold, at least about 4-fold, at least about 4.5-fold, at least about 5-fold, at least about 5.5-fold, at least about 6-fold, at least about 6.5-fold, at least about 7-fold, at least about 7.5-fold, at least about 8-fold, at least about 8.5-fold, at least about 9-fold, at least about 9.5-fold, at least about 10-fold, at least about 15-fold, at least about 20-fold, at least about 25-fold, at least about 30-fold, at least about 35-fold, at least about 40-fold, at least about 45-fold, or at least about 50-fold. In some embodiments, the increase in the prime editing efficiency, DNA polymerase activity, DNA-binding activity, or DNA endonuclease activity of a prime editor comprising a GB1 domain relative to a prime editor lacking the GB1 domain may be from 1-fold to 2-fold, from 1.5-fold to 2.5-fold, from 2-fold to 3-fold, from 2.5-fold to 3.5-fold, from 3-fold to 4-fold, from 3.5-fold to 4.5-fold, from 4-fold to 5-fold, from 4.5-fold to 5.5-fold, from 5-fold to 6-fold, from 5.5-fold to 6.5-fold, from 6-fold to 7-fold, from 6.5-fold to 7.5-fold, from 7-fold to 8-fold, from 7.5-fold to 8.5-fold, from 8-fold to 9-fold, from 8.5-fold to 9.5-fold, from 9-fold to 10-fold, from 9.5-fold to 20-fold, from 15-fold to 25-fold, from 20-fold to 30-fold, from 25-fold to 35-fold, from 30-fold to 40-fold, from 35-fold to 45-fold, or from 40-fold to 50-fold.

[0203] In some embodiments, a GB1 domain of a prime editor comprises an amino acid sequence that is at least about 50%, at least about 55%, at least about 60%, at least about 65%, at least about 70%, at least about 75%, at least about 80%, at least about 85%, at least about 86%, at least about 87%, at least about 88%, at least about 89%, at least about 90%, at least about 91%, at least about 92%, at least about 93%, at least about 94%, at least about 95%, at least about 96%, at least about 97%, at least about 98%, at least about 99% identical to a sequence selected from the group consisting of: SEQ ID NOs: 96-124 or 137. In some embodiments, a GB1 domain comprises an amino acid sequence that has no more than 1, 2, 3, 4, 5, 6, 7, 8, 9, 10, 11, 12, 13, 14, 15, 16, 17, 18, 19, 20, 25, 30, 35, 40, 45, or 50 differences e.g., mutations e.g., deletions or substitutions compared to any of the amino acid sequences set forth in SEQ ID NO: 96-124 or 137. In some embodiments, a GB1 domain of a prime editor comprises an amino acid sequence that is selected from the group consisting of: SEQ ID NOs: 96-124 or 137. In some embodiments, the GB1 domain comprises an amino acid sequence that is at least about 50%, at least about 55%, at least about 60%, at least about 65%, at least about 70%, at least about 75%, at least about 80%, at least about 85%, at least about 86%, at least about 87%, at least about 88%, at least about 89%, at least about 90%, at least about 91%, at least about 92%, at least about 93%, at least about 94%, at least about 95%, at least about 96%, at least about 97%, at least about 98%, at least about 99% identical to a sequence selected from the group consisting of: SEQ ID NO: 102 and SEQ ID NO: 137. In some embodiments, a GB1 domain comprises an amino acid sequence that has no more than 1, 2, 3, 4, 5, 6, 7, 8, 9, 10, 11, 12, 13, 14, 15, 16, 17, 18, 19, 20, 25, 30, 35, 40, 45, or 50 differences e.g., mutations e.g., deletions or substitutions compared to any of the ammo acid sequences set forth in SEQ ID NO: 102 and SEQ ID NO: 137. In some embodiments, a GB1 domain of a prime editor comprises an amino acid sequence selected from the group consisting of: SEQ ID NO: 102 and SEQ ID NO: 137. In some embodiments, the GB1 domain comprises an amino acid sequence that is at least about 50%, at least about 55%, at least about 60%, at least about 65%, at least about 70%, at least about 75%, at least about 80%, at least about 85%, at least about 86%, at least about 87%, at least about 88%, at least about 89%, at least about 90%, at least about 91%, at least about 92%, at least about 93%, at least about 94%, at least about 95%, at least about 96%, at least about 97%, at least about 98%, at least about 99% identical to a sequence set forth in SEQ ID NO: 102. In some embodiments, a GB1 domain comprises an amino acid sequence that has no more than 1, 2, 3, 4, 5, 6, 7, 8, 9, 10, 11, 12, 13, 14, 15, 16, 17, 18, 19, 20, 25, 30, 35, 40, 45, or 50 differences e.g., mutations e.g., deletions or substitutions compared to an amino acid sequences set forth in SEQ ID NO: 102. In some embodiments, a GB1 domain of a prime editor comprises an amino acid sequence set forth at SEQ ID NO: 102. In some embodiments, the GB1 domain comprises an amino acid sequence that is at least about 50%, at least about 55%, at least about 60%, at least about 65%, at least about 70%, at least about 75%, at least about 80%, at least about 85%, at least about 86%, at least about 87%, at least about 88%, at least about 89%, at least about 90%, at least about 91%, at least about 92%, at least about 93%, at least about 94%, at least about 95%, at least about 96%, at least about 97%, at least about 98%, at least about 99% identical to a sequence set forth in SEQ ID NO: 137. In some embodiments, a GB1 domain comprises an amino acid sequence that has no more than 1, 2, 3, 4, 5, 6, 7, 8, 9, 10, 11, 12, 13, 14, 15, 16, 17, 18, 19, 20, 25, 30, 35, 40, 45, or 50 differences e.g., mutations e.g., deletions or substitutions compared to an amino acid sequences set forth in SEQ ID NO: 137. In some embodiments, a GB1 domain of a prime editor comprises an amino acid sequence set forth at SEQ ID NO: 137.

[0204] In some embodiments, a prime editor comprising GB1 domain comprises an amino acid sequence that is at least about 50%, at least about 55%, at least about 60%, at least about 65%, at least about 70%, at least about 75%, at least about 80%, at least about 85%, at least about 86%, at least about 87%, at least about 88%, at least about 89%, at least about 90%, at least about 91%, at least about 92%, at least about 93%, at least about 94%, at least about 95%, at least about 96%, at least about 97%, at least about 98%, at least about 99% identical to a sequence selected from the group consisting of: SEQ ID NOs: 125-128. In some embodiments, a prime editor comprising GB1 domain comprises an amino acid sequence that has no more than 1, 2, 3, 4, 5, 6, 7, 8, 9, 10, 11, 12, 13, 14, 15, 16, 17, 18, 19, 20, 25, 30, 35, 40, 45, or 50 differences e.g., mutations e.g., deletions or substitutions compared to any of the amino acid sequences set forth in SEQ ID NO: 125-128. In some embodiments, a prime editor comprising GB1 domain of a prime editor comprises an amino acid sequence that is selected from the group consisting of: SEQ ID NOs: 125-128.

[0205] In some embodiments, a GB1 domain may be a basic GB1 (bGB1) domain. In some embodiments, a bGB1 domain may increase the solubility of a prime editor in vitro, relative to a prime editor comprising a GB1 domain. In some embodiments, a bGB1 domain may increase the solubility of a prime editor in vivo, relative to a prime editor comprising a GB1 domain. The increase in solubility of a prime editor comprising a bGB1 domain relative to a prime editor comprising a GB1 domain, in some case, may be at least about 10%, at least about 15%, at least about 20%, at least about 25%, at least about 30%, at least about 35%, at least about 40%, at least about 45%, at least about 50%, at least about 55%, at least about 60%, at least about 65%, at least about 70%, at least about 75%, at least about 80%, at least about 85%, at least about 90%, at least about 95%, at least about 100%, at least about 105%, at least about 110%, at least about 115%, at least about 120%, at least about 125%, at least about 130%, at least about 135%, at least about 140%, at least about 145%, at least about 150%, at least about 155%, at least about 160%, at least about 165%, at least about 170%, at least about 175%, at least about 180%, at least about 185%, at least about 190%, at least about 195%, or at least about 200%. In some embodiments, the increase in solubility of a prime editor comprising a bGB1 domain relative to a prime editor comprising a GB1 domain may be from 10 to 20%, from 15 to 25%, from 20 to 30%, from 25 to 35%, from 30 to 40%, from 35 to 45%, from 40 to 50%, from 45 to 55%, from 50 to 60%, from 55 to 65%, from 60 to 70%, from 65 to 75%, from 70 to 80%, from 75 to 85%, from 80 to 90%, from 85 to 95%, from 90 to 100%, from 95 to 105%, from 100 to 110%, from 105 to 115%, from 110 to 120%, from 115 to 125%, from 120 to 130%, from 125 to 135%, from 130 to 140%, from 135 to 145%, from 140 to 150%, from 145 to 155%, from 150 to 160%, from 155 to 165%, from 160 to 170%, from 165 to 175%, from 170 to 180%, from 175 to 185%, from 180 to 190%, from 185 to 195%, or from 190 to 200%. The increase in solubility of a prime editor comprising a bGB1 domain relative to a prime editor comprising a GB1 domain, in some case, may be at least about at least about 1-fold, at least about 1.5-fold, at least about 2-fold, at least about 2.5-fold, at least about 3-fold, at least about 3.5-fold, at least about 4-fold, at least about 4.5-fold, at least about 5-fold, at least about 5.5-fold, at least about 6-fold, at least about 6.5-fold, at least about 7-fold, at least about 7.5-fold, at least about 8-fold, at least about 8.5-fold, at least about 9-fold, at least about 9.5-fold, at least about 10-fold, at least about 15-fold, at least about 20-fold, at least about 25-fold, at least about 30-fold, at least about 35-fold, at least about 40-fold, at least about 45-fold, or at least about 50-fold. In some embodiments, the increase in solubility of a prime editor comprising a bGB1 domain relative to a prime editor comprising a GB1 domain may be from 1-fold to 2-fold, from 1.5-fold to 2.5-fold, from 2-fold to 3-fold, from 2.5-fold to 3.5-fold, from 3-fold to 4-fold, from 3.5-fold to 4.5-fold, from 4-fold to 5-fold, from 4.5-fold to 5.5-fold, from 5-fold to 6-fold, from 5.5-fold to 6.5-fold, from 6-fold to 7-fold, from 6.5-fold to 7.5-fold, from 7-fold to 8-fold, from 7.5-fold to 8.5-fold, from 8-fold to 9-fold, from 8.5-fold to 9.5-fold, from 9-fold to 10-fold, from 9.5-fold to 20-fold, from 15-fold to 25-fold, from 20-fold to 30-fold, from 25-fold to 35-fold, from 30-fold to 40-fold, from 35-fold to 45-fold, or from 40-fold to 50-fold.

[0206] In some embodiments, a bGB1 domain may increase the expression level of a prime editor in vitro, relative to a prime editor comprising a GB1 domain. In some embodiments, a bGB1 domain may increase the expression level of a prime editor in vivo, relative to a prime editor comprising a GB1 domain. The increase in expression level of a prime editor comprising a bGB1 domain relative to a prime editor comprising a GB1 domain, in some case, may be at least about 10%, at least about 15%, at least about 20%, at least about 25%, at least about 30%, at least about 35%, at least about 40%, at least about 45%, at least about 50%, at least about 55%, at least about 60%, at least about 65%, at least about 70%, at least about 75%, at least about 80%, at least about 85%, at least about 90%, at least about 95%, at least about 100%, at least about 105%, at least about 110%, at least about 115%, at least about 120%, at least about 125%, at least about 130%, at least about 135%, at least about 140%, at least about 145%, at least about 150%, at least about 155%, at least about 160%, at least about 165%, at least about 170%, at least about 175%, at least about 180%, at least about 185%, at least about 190%, at least about 195%, or at least about 200%. In some embodiments, the increase in expression level of a prime editor comprising a bGB1 domain relative to a prime editor comprising a GB1 domain may be from 10 to 20%, from 15 to 25%, from 20 to 30%, from 25 to 35%, from 30 to 40%, from 35 to 45%, from 40 to 50%, from 45 to 55%, from 50 to 60%, from 55 to 65%, from 60 to 70%, from 65 to 75%, from 70 to 80%, from 75 to 85%, from 80 to 90%, from 85 to 95%, from 90 to 100%, from 95 to 105%, from 100 to 110%, from 105 to 115%, from 110 to 120%, from 115 to 125%, from 120 to 130%, from 125 to 135%, from 130 to 140%, from 135 to 145%, from 140 to 150%, from 145 to 155%, from 150 to 160%, from 155 to 165%, from 160 to 170%, from 165 to 175%, from 170 to 180%, from 175 to 185%, from 180 to 190%, from 185 to 195%, or from 190 to 200%. The increase in expression level of a prime editor comprising a bGB1 domain relative to a prime editor comprising a GB1 domain, in some case, may be at least about at least about 1-fold, at least about 1.5-fold, at least about 2-fold, at least about 2.5-fold, at least about 3-fold, at least about 3.5-fold, at least about 4-fold, at least about 4.5-fold, at least about 5-fold, at least about 5.5-fold, at least about 6-fold, at least about 6.5-fold, at least about 7-fold, at least about 7.5-fold, at least about 8-fold, at least about 8.5-fold, at least about 9-fold, at least about 9.5-fold, at least about 10-fold, at least about 15-fold, at least about 20-fold, at least about 25-fold, at least about 30-fold, at least about 35-fold, at least about 40-fold, at least about 45-fold, or at least about 50-fold. In some embodiments, the increase in expression level of a prime editor comprising a bGB1 domain relative to a prime editor comprising a GB1 domain may be from 1-fold to 2-fold, from 1.5-fold to 2.5-fold, from 2-fold to 3-fold, from 2.5-fold to 3.5-fold, from 3-fold to 4-fold, from 3.5-fold to 4.5-fold, from 4-fold to 5-fold, from 4.5-fold to 5.5-fold, from 5-fold to 6-fold, from 5.5-fold to 6.5-fold, from 6-fold to 7-fold, from 6.5-fold to 7.5-fold, from 7-fold to 8-fold, from 7.5-fold to 8.5-fold, from 8-fold to 9-fold, from 8.5-fold to 9.5-fold, from 9-fold to 10-fold, from 9.5-fold to 20-fold, from 15-fold to 25-fold, from 20-fold to 30-fold, from 25-fold to 35-fold, from 30-fold to 40-fold, from 35-fold to 45-fold, or from 40-fold to 50-fold. The increase in the prime editing efficiency, DNA polymerase activity, DNA-binding activity, or DNA endonuclease activity of a prime editor comprising a bGB1 domain relative to a prime editor comprising a GB1 domain, in some case, may be at least about 10%, at least about 15%, at least about 20%, at least about 25%, at least about 30%, at least about 35%, at least about 40%, at least about 45%, at least about 50%, at least about 55%, at least about 60%, at least about 65%, at least about 70%, at least about 75%, at least about 80%, at least about 85%, at least about 90%, at least about 95%, at least about 100%, at least about 105%, at least about 110%, at least about 115%, at least about 120%, at least about 125%, at least about 130%, at least about 135%, at least about 140%, at least about 145%, at least about 150%, at least about 155%, at least about 160%, at least about 165%, at least about 170%, at least about 175%, at least about 180%, at least about 185%, at least about 190%, at least about 195%, or at least about 200%.

[0207] In some embodiments, a prime editor comprising a bGB1 domain comprises increased prime editing efficiency, DNA polymerase activity, DNA-binding activity, or DNA endonuclease activity relative to a prime editor comprising a GB1 domain. In some embodiments, the increase in the prime editing efficiency, DNA polymerase activity, DNA-binding activity, or DNA endonuclease activity of a prime editor comprising a bGB1 domain relative to a prime editor comprising a GB1 domain may be from 10 to 20%, from 15 to 25%, from 20 to 30%, from 25 to 35%, from 30 to 40%, from 35 to 45%, from 40 to 50%, from 45 to 55%, from 50 to 60%, from 55 to 65%, from 60 to 70%, from 65 to 75%, from 70 to 80%, from 75 to 85%, from 80 to 90%, from 85 to 95%, from 90 to 100%, from 95 to 105%, from 100 to 110%, from 105 to 115%, from 110 to 120%, from 115 to 125%, from 120 to 130%, from 125 to 135%, from 130 to 140%, from 135 to 145%, from 140 to 150%, from 145 to 155%, from 150 to 160%, from 155 to 165%, from 160 to 170%, from 165 to 175%, from 170 to 180%, from 175 to 185%, from 180 to 190%, from 185 to 195%, or from 190 to 200%. The increase in the prime editing efficiency, DNA polymerase activity, DNA-binding activity, or DNA endonuclease activity of a prime editor comprising a bGB1 domain relative to a prime editor comprising a GB1 domain, in some case, may be at least about at least about 1-fold, at least about 1.5-fold, at least about 2-fold, at least about 2.5-fold, at least about 3-fold, at least about 3.5-fold, at least about 4-fold, at least about 4.5-fold, at least about 5-fold, at least about 5.5-fold, at least about 6-fold, at least about 6.5-fold, at least about 7-fold, at least about 7.5-fold, at least about 8-fold, at least about 8.5-fold, at least about 9-fold, at least about 9.5-fold, at least about 10-fold, at least about 15-fold, at least about 20-fold, at least about 25-fold, at least about 30-fold, at least about 35-fold, at least about 40-fold, at least about 45-fold, or at least about 50-fold. In some embodiments, the increase in the prime editing efficiency, DNA polymerase activity, DNA-binding activity, or DNA endonuclease activity of a prime editor comprising a bGB1 domain relative to a prime editor comprising a GB1 domain may be from 1-fold to 2-fold, from 1.5-fold to 2.5-fold, from 2-fold to 3-fold, from 2.5-fold to 3.5-fold, from 3-fold to 4-fold, from 3.5-fold to 4.5-fold, from 4-fold to 5-fold, from 4.5-fold to 5.5-fold, from 5-fold to 6-fold, from 5.5-fold to 6.5-fold, from 6-fold to 7-fold, from 6.5-fold to 7.5-fold, from 7-fold to 8-fold, from 7.5-fold to 8.5-fold, from 8-fold to 9-fold, from 8.5-fold to 9.5-fold, from 9-fold to 10-fold, from 9.5-fold to 20-fold, from 15-fold to 25-fold, from 20-fold to 30-fold, from 25-fold to 35-fold, from 30-fold to 40-fold, from 35-fold to 45-fold, or from 40-fold to 50-fold.

[0208] In some embodiments, a bGB1 domain may increase the solubility of a prime editor in vitro, relative to a prime editor lacking the bGB1 domain. In some embodiments, a bGB1 domain may increase the solubility of a prime editor in vivo, relative to a prime editor lacking the bGB1 domain. The increase in solubility of a prime editor comprising a bGB1 domain relative to a prime editor lacking the bGB1 domain, in some case, may be at least about 10%, at least about 15%, at least about 20%, at least about 25%, at least about 30%, at least about 35%, at least about 40%, at least about 45%, at least about 50%, at least about 55%, at least about 60%, at least about 65%, at least about 70%, at least about 75%, at least about 80%, at least about 85%, at least about 90%, at least about 95%, at least about 100%, at least about 105%, at least about 110%, at least about 115%, at least about 120%, at least about 125%, at least about 130%, at least about 135%, at least about 140%, at least about 145%, at least about 150%, at least about 155%, at least about 160%, at least about 165%, at least about 170%, at least about 175%, at least about 180%, at least about 185%, at least about 190%, at least about 195%, or at least about 200%. In some embodiments, the increase in solubility of a prime editor comprising a bGB1 domain relative to a prime editor lacking the bGB1 domain may be from 10 to 20%, from 15 to 25%, from 20 to 30%, from 25 to 35%, from 30 to 40%, from 35 to 45%, from 40 to 50%, from 45 to 55%, from 50 to 60%, from 55 to 65%, from 60 to 70%, from 65 to 75%, from 70 to 80%, from 75 to 85%, from 80 to 90%, from 85 to 95%, from 90 to 100%, from 95 to 105%, from 100 to 110%, from 105 to 115%, from 110 to 120%, from 115 to 125%, from 120 to 130%, from 125 to 135%, from 130 to 140%, from 135 to 145%, from 140 to 150%, from 145 to 155%, from 150 to 160%, from 155 to 165%, from 160 to 170%, from 165 to 175%, from 170 to 180%, from 175 to 185%, from 180 to 190%, from 185 to 195%, or from 190 to 200%. The increase in solubility of a prime editor comprising a bGB1 domain relative to a prime editor lacking the bGB1 domain, in some case, may be at least about at least about 1-fold, at least about 1.5-fold, at least about 2-fold, at least about 2.5-fold, at least about 3-fold, at least about 3.5-fold, at least about 4-fold, at least about 4.5-fold, at least about 5-fold, at least about 5.5-fold, at least about 6-fold, at least about 6.5-fold, at least about 7-fold, at least about 7.5-fold, at least about 8-fold, at least about 8.5-fold, at least about 9-fold, at least about 9.5-fold, at least about 10-fold, at least about 15-fold, at least about 20-fold, at least about 25-fold, at least about 30-fold, at least about 35-fold, at least about 40-fold, at least about 45-fold, or at least about 50-fold. In some embodiments, the increase in solubility of a prime editor comprising a bGB1 domain relative to a prime editor lacking the bGB1 domain may be from 1-fold to 2-fold, from 1.5-fold to 2.5-fold, from 2-fold to 3-fold, from 2.5-fold to 3.5-fold, from 3-fold to 4-fold, from 3.5-fold to 4.5-fold, from 4-fold to 5-fold, from 4.5-fold to 5.5-fold, from 5-fold to 6-fold, from 5.5-fold to 6.5-fold, from 6-fold to 7-fold, from 6.5-fold to 7.5-fold, from 7-fold to 8-fold, from 7.5-fold to 8.5-fold, from 8-fold to 9-fold, from 8.5-fold to 9.5-fold, from 9-fold to 10-fold, from 9.5-fold to 20-fold, from 15-fold to 25-fold, from 20-fold to 30-fold, from 25-fold to 35-fold, from 30-fold to 40-fold, from 35-fold to 45-fold, or from 40-fold to 50-fold.

[0209] In some embodiments, a bGB1 domain may increase the expression level of a prime editor in vitro, relative to a prime editor lacking the bGB1 domain. In some embodiments, a bGB1 domain may increase the expression level of a prime editor in vivo, relative to a prime editor lacking the bGB1 domain. The increase in expression level of a prime editor comprising a bGB1 domain relative to a prime editor lacking the bGB1 domain, in some case, may be at least about 10%, at least about 15%, at least about 20%, at least about 25%, at least about 30%, at least about 35%, at least about 40%, at least about 45%, at least about 50%, at least about 55%, at least about 60%, at least about 65%, at least about 70%, at least about 75%, at least about 80%, at least about 85%, at least about 90%, at least about 95%, at least about 100%, at least about 105%, at least about 110%, at least about 115%, at least about 120%, at least about 125%, at least about 130%, at least about 135%, at least about 140%, at least about 145%, at least about 150%, at least about 155%, at least about 160%, at least about 165%, at least about 170%, at least about 175%, at least about 180%, at least about 185%, at least about 190%, at least about 195%, or at least about 200%. In some embodiments, the increase in expression level of a prime editor comprising a bGB1 domain relative to a prime editor lacking the bGB1 domain may be from 10 to 20%, from 15 to 25%, from 20 to 30%, from 25 to 35%, from 30 to 40%, from 35 to 45%, from 40 to 50%, from 45 to 55%, from 50 to 60%, from 55 to 65%, from 60 to 70%, from 65 to 75%, from 70 to 80%, from 75 to 85%, from 80 to 90%, from 85 to 95%, from 90 to 100%, from 95 to 105%, from 100 to 110%, from 105 to 115%, from 110 to 120%, from 115 to 125%, from 120 to 130%, from 125 to 135%, from 130 to 140%, from 135 to 145%, from 140 to 150%, from 145 to 155%, from 150 to 160%, from 155 to 165%, from 160 to 170%, from 165 to 175%, from 170 to 180%, from 175 to 185%, from 180 to 190%, from 185 to 195%, or from 190 to 200%. The increase in expression level of a prime editor comprising a bGB1 domain relative to a prime editor lacking the bGB1 domain, in some case, may be at least about at least about 1-fold, at least about 1.5-fold, at least about 2-fold, at least about 2.5-fold, at least about 3-fold, at least about 3.5-fold, at least about 4-fold, at least about 4.5-fold, at least about 5-fold, at least about 5.5-fold, at least about 6-fold, at least about 6.5-fold, at least about 7-fold, at least about 7.5-fold, at least about 8-fold, at least about 8.5-fold, at least about 9-fold, at least about 9.5-fold, at least about 10-fold, at least about 15-fold, at least about 20-fold, at least about 25-fold, at least about 30-fold, at least about 35-fold, at least about 40-fold, at least about 45-fold, or at least about 50-fold. In some embodiments, the increase in expression level of a prime editor comprising a bGB1 domain relative to a prime editor lacking the bGB1 domain may be from 1-fold to 2-fold, from 1.5-fold to 2.5-fold, from 2-fold to 3-fold, from 2.5-fold to 3.5-fold, from 3-fold to 4-fold, from 3.5-fold to 4.5-fold, from 4-fold to 5-fold, from 4.5-fold to 5.5-fold, from 5-fold to 6-fold, from 5.5-fold to 6.5-fold, from 6-fold to 7-fold, from 6.5-fold to 7.5-fold, from 7-fold to 8-fold, from 7.5-fold to 8.5-fold, from 8-fold to 9-fold, from 8.5-fold to 9.5-fold, from 9-fold to 10-fold, from 9.5-fold to 20-fold, from 15-fold to 25-fold, from 20-fold to 30-fold, from 25-fold to 35-fold, from 30-fold to 40-fold, from 35-fold to 45-fold, or from 40-fold to 50-fold.

[0210] In some embodiments, a prime editor comprising a bGB1 domain may have increased prime editing efficiency, DNA polymerase activity, DNA-binding activity, or DNA endonuclease activity relative to a prime editor lacking a bGB1 domain. The increase in the prime editing efficiency, DNA polymerase activity, DNA-binding activity, or DNA endonuclease activity of a prime editor comprising a bGB1 domain relative to a prime editor lacking the bGB1 domain, in some case, may be at least about 10%, at least about 15%, at least about 20%, at least about 25%, at least about 30%, at least about 35%, at least about 40%, at least about 45%, at least about 50%, at least about 55%, at least about 60%, at least about 65%, at least about 70%, at least about 75%, at least about 80%, at least about 85%, at least about 90%, at least about 95%, at least about 100%, at least about 105%, at least about 110%, at least about 115%, at least about 120%, at least about 125%, at least about 130%, at least about 135%, at least about 140%, at least about 145%, at least about 150%, at least about 155%, at least about 160%, at least about 165%, at least about 170%, at least about 175%, at least about 180%, at least about 185%, at least about 190%, at least about 195%, or at least about 200%. In some embodiments, the increase in the prime editing efficiency, DNA polymerase activity, DNA-binding activity, or DNA endonuclease activity of a prime editor comprising a bGB1 domain relative to a prime editor lacking the bGB1 domain may be from 10 to 20%, from 15 to 25%, from 20 to 30%, from 25 to 35%, from 30 to 40%, from 35 to 45%, from 40 to 50%, from 45 to 55%, from 50 to 60%, from 55 to 65%, from 60 to 70%, from 65 to 75%, from 70 to 80%, from 75 to 85%, from 80 to 90%, from 85 to 95%, from 90 to 100%, from 95 to 105%, from 100 to 110%, from 105 to 115%, from 110 to 120%, from 115 to 125%, from 120 to 130%, from 125 to 135%, from 130 to 140%, from 135 to 145%, from 140 to 150%, from 145 to 155%, from 150 to 160%, from 155 to 165%, from 160 to 170%, from 165 to 175%, from 170 to 180%, from 175 to 185%, from 180 to 190%, from 185 to 195%, or from 190 to 200%. The increase in the prime editing efficiency, DNA polymerase activity, DNA-binding activity, or DNA endonuclease activity of a prime editor comprising a bGB1 domain relative to a prime editor lacking the bGB1 domain, in some case, may be at least about at least about 1-fold, at least about 1.5-fold, at least about 2-fold, at least about 2.5-fold, at least about 3-fold, at least about 3.5-fold, at least about 4-fold, at least about 4.5-fold, at least about 5-fold, at least about 5.5-fold, at least about 6-fold, at least about 6.5-fold, at least about 7-fold, at least about 7.5-fold, at least about 8-fold, at least about 8.5-fold, at least about 9-fold, at least about 9.5-fold, at least about 10-fold, at least about 15-fold, at least about 20-fold, at least about 25-fold, at least about 30-fold, at least about 35-fold, at least about 40-fold, at least about 45-fold, or at least about 50-fold. In some embodiments, the increase in the prime editing efficiency, DNA polymerase activity, DNA-binding activity, or DNA endonuclease activity of a prime editor comprising a bGB1 domain relative to a prime editor lacking the bGB1 domain may be from 1-fold to 2-fold, from 1.5-fold to 2.5-fold, from 2-fold to 3-fold, from 2.5-fold to 3.5-fold, from 3-fold to 4-fold, from 3.5-fold to 4.5-fold, from 4-fold to 5-fold, from 4.5-fold to 5.5-fold, from 5-fold to 6-fold, from 5.5-fold to 6.5-fold, from 6-fold to 7-fold, from 6.5-fold to 7.5-fold, from 7-fold to 8-fold, from 7.5-fold to 8.5-fold, from 8-fold to 9-fold, from 8.5-fold to 9.5-fold, from 9-fold to 10-fold, from 9.5-fold to 20-fold, from 15-fold to 25-fold, from 20-fold to 30-fold, from 25-fold to 35-fold, from 30-fold to 40-fold, from 35-fold to 45-fold, or from 40-fold to 50-fold.

[0211] In some embodiments, the bGB1 domain comprises an amino acid sequence that is at least about 50%, at least about 55%, at least about 60%, at least about 65%, at least about 70%, at least about 75%, at least about 80%, at least about 85%, at least about 86%, at least about 87%, at least about 88%, at least about 89%, at least about 90%, at least about 91%, at least about 92%, at least about 93%, at least about 94%, at least about 95%, at least about 96%, at least about 97%, at least about 98%, at least about 99%, identical to an amino acid sequence set forth in SEQ ID NO: 137. In some embodiments, a bGB1 domain of a prime editor comprises an amino acid sequence set forth at SEQ ID NO: 137.

[0212] In some embodiments, a bGB1 domain may comprise asparagine at position 22 of SEQ ID NO: 102, arginine at position 36 of SEQ ID NO: 102, or lysine at position 42 of SEQ ID NO: 102. In some embodiments, a bGB1 domain may comprise asparagine at position 22 of SEQ ID NO: 102. In some embodiments, a bGB1 domain may comprise arginine at position 36 of SEQ ID NO: 102. In some embodiments, a bGB1 domain may comprise lysine at position 42 of SEQ ID NO: 102. In other cases, a bGB1 domain may comprise asparagine at position 22 of SEQ ID NO: 102, arginine at position 36 of SEQ ID NO: 102, and lysine at position 42 of SEQ ID NO: 102. In some embodiments, a bGB1 domain may have an isoelectric point (pI) of about 8. In some embodiments, a bGB1 domain may have an isoelectric point (pI) of about 8.1 In some embodiments, a bGB1 domain may have an isoelectric point (pI) of about 8.2. In some embodiments, a bGB1 domain may have an isoelectric point (pI) of about 8.3. In some embodiments, a bGB1 domain may have an isoelectric point (pI) of about 8.4. In some embodiments, a bGB1 domain may have an isoelectric point (pI) of about 8.5. In some embodiments, a bGB1 domain may have an isoelectric point (pI) of about 8.6. In some embodiments, a bGB1 domain may have an isoelectric point (pI) of about 8.7. In some embodiments, a bGB1 domain may have an isoelectric point (pI) of about 8.8. In some embodiments, a bGB1 domain may have an isoelectric point (pI) of about 8.9. In some embodiments, a bGB1 domain may have an isoelectric point (pI) of 8.67.

[0213] DNA Binding Domain

[0214] In certain aspects, the prime editors provided herein comprises a polypeptide domain having DNA binding activity (e.g., a DNA binding domain). In certain aspects, the prime editors provided herein comprise a DNA binding domain comprising an amino acid sequence at least 85% identical (e.g., at least 86%, at least 87%, at least 88%, at least 89%, at least 90%, at least 91%, at least 92%, at least 93%, at least 94%, at least 95%, at least 96%, at least 97%, at least 98%, at least 99% identical, or 100% identical) to any one of the sequences set forth in SEQ ID NO: 138-146, 494, 858, 1100 (Table 8). In some embodiments, the DNA-binding domain comprises an amino acid sequence that has no more than 1, 2, 3, 4, 5, 6, 7, 8, 9, 10, 11, 12, 13, 14, 15, 16, 17, 18, 19, or 20 differences e.g., mutations e.g., deletions or substitutions compared to any of the amino acid sequences set forth in SEQ ID NO: 138-146, 494, 858, or 1100. In some embodiments, the prime editors provided herein comprises a DNA binding domain comprising an amino acid sequence that does not a have a N-terminus methionine. In some embodiments, the prime editors provided herein comprises a DNA binding domain comprising an amino acid sequence comprising a N-terminus methionine. In some embodiments, the amino acid sequence of a DNA binding domain may be N-terminally modified by one or more processing enzymes, e.g., by Methionine aminopeptidases (MAP).

[0215] In certain aspects, the prime editors provided herein comprise a DNA binding domain comprising an amino acid sequence at least 85% identical (e.g., at least 86%, at least 87%, at least 88%, at least 89%, at least 90%, at least 91%, at least 92%, at least 93%, at least 94%, at least 95%, at least 96%, at least 97%, at least 98%, at least 99% identical, or 100% identical) to any one of the sequences set forth in SEQ ID NO: 495-503 (Table 8). In some embodiments, the DNA-binding domain comprises an amino acid sequence that has no more than 1, 2, 3, 4, 5, 6, 7, 8, 9, 10, 11, 12, 13, 14, 15, 16, 17, 18, 19, or 20 differences e.g., mutations e.g., deletions or substitutions compared to any of the amino acid sequences set forth in SEQ ID NO: 495-503.

[0216] In some embodiments, the DNA binding domain comprises a nuclease activity, for example, RNA-guided DNA endonuclease activity of a Cas polypeptide. In some embodiments, the DNA binding domain comprises a nuclease domain or nuclease activity. In some embodiments, DNA binding domain comprises a nickase, or a fully active nuclease. As used herein, the term “nickase” refers to a nuclease capable of cleaving only one strand of a double-stranded DNA target. In some embodiments, the prime editor comprises a DNA binding domain that is an inactive nuclease. In some embodiments, the DNA-binding domain is a programmable DNA binding domain. A programmable DNA binding domain refers to a protein domain that is designed to bind a specific nucleic acid sequence, e.g., a target DNA or a target RNA. In some embodiments, the DNA-binding domain is a polynucleotide programmable DNA-binding domain that can associate with a guide polynucleotide (e.g., a PEgRNA) that guides the DNA-binding domain to a specific DNA sequence, e.g., a search target sequence in a target gene.

[0217] In some embodiments, the polypeptide domain comprises a DNA binding domain. In some embodiments, the polypeptide domain comprises a DNA endonuclease domain. In some embodiments, a prime editor comprises a DNA binding domain and a DNA endonuclease domain. In some embodiments, the DNA-binding domain and the DNA endonuclease domain may comprise the same amino acid sequence. In one case, the DNA-binding domain and the DNA endonuclease domain may comprise overlapping amino acids. In some embodiments, the DNA-binding domain and the DNA endonuclease domain may comprise non-overlapping amino acids, e.g., the DNA-binding domain and the DNA endonuclease domain may comprise two independent amino acid sequences. In some embodiments, a prime editor may comprise more than one DNA-binding domain. In some embodiments, a prime editor may comprise more than one DNA endonuclease domain.

[0218] In some embodiments, a prime editor may comprise DNA-binding activity or a DNA endonuclease activity. In some embodiments, a prime editor may comprise a DNA-binding activity or a DNA endonuclease activity. In some embodiments, a prime editor may comprise a DNA endonuclease activity. In some embodiments, a prime editor may comprise a DNA-binding activity and a DNA endonuclease activity.

[0219] In some embodiments, a prime editor comprises an endonuclease domain having single strand DNA cleavage activity. For example, the endonuclease domain may be a Fokl nuclease domain. In some embodiments, a prime editor comprises an endonuclease having with modified or reduced nuclease activity as compared to a wild type endonuclease domain. For example, the endonuclease domain may comprise one or more amino acid substitutions as compared to a wild type endonuclease domain. As a result, the endonuclease domain may have single strand DNA cleavage activity (i.e., a nickase) when contacted with a double stranded DNA sequence. In some instances, the endonuclease domain may comprise one or more amino acid substitutions that abolish the nuclease activity as compared to a wild type endonuclease.

[0220] The DNA-binding domain of a prime editor, in some embodiments, may comprise a Clustered Regularly Interspaced Short Palindromic Repeats (CRISPR) Associated (Cas) polypeptide, a zinc-finger nuclease (ZFN) and/or a transcription activator-like effector nucleases (TALEN).

### Cas Protein

[0221] In some embodiments, the DNA-binding domain of a prime editor may comprise a Cas protein. A Cas protein may be a Class 1 or a Class 2 Cas protein. A Cas protein may be a type I, type II, type III, type IV, type V Cas protein, or type VI Cas protein. A Cas protein may comprise one or more domains. Non-limiting examples of domains include, guide nucleic acid recognition and/or binding domain, nuclease domains (e.g., DNase or RNase domains, RuvC, HNH), DNA binding domain, RNA binding domain, helicase domains, protein-protein interaction domains, and dimerization domains. In various embodiments, a Cas protein domain comprises a guide nucleic acid recognition and/or a binding domain that may interact with a guide nucleic acid, and one or more nuclease domains that comprise catalytic activity for nucleic acid cleavage. In some embodiments, a Cas protein may comprise a chimeric Cas protein that is fused to other proteins or polypeptides. A Cas protein may comprise be a chimera of various Cas proteins, for example, comprising domains from different Cas proteins.

[0222] In some embodiments, a prime editor comprises a DNA binding domain that is a Cas polypeptide or a mutant, variant, or functional fragment thereof. Non-limiting examples of Cas proteins include Cas1, Cas1B, Cas2, Cas3, Cas4, Cas5, Cas5d, Cas5t, Cas5h, Cas5a, Cas6, Cas7, Cas8, Cas8a, Cas8b, Cas8c, Cas9 (e.g., Csn1 or Csx12), Cas10, Cas1Od, Cas12a/Cpf1, Cas12b/C2c1, Cas12c/C2c3, Cas12d/CasY, Cas12e/CasX, Cas12g, Cas12h, Cas12i, Csy1, Csy2, Csy3, Csy4, Cse1, Cse2, Cse3, Cse4, Cse5e, Csc1, Csc2, Csa5, Csn1, Csn2, Csm1, Csm2, Csm3, Csm4, Csm5, Csm6, Cmr1, Cmr3, Cmr4, Cmr5, Cmr6, Csb1, Csb2, Csb3, Csx17, Csx14, Csx10, Csx16, CsaX, Csx3, Csx1, Csx1S, Csx11, Csf1, Csf2, CsO, Csf4, Csd1, Csd2, Cst1, Cst2, Csh1, Csh2, Csa1, Csa2, Csa3, Csa4, Csa5, Type II Cas effector proteins, Type V Cas effector proteins, Type VI Cas effector proteins, CARF, DinG, Cpf1, Cas12b/C2c1, Cas12c/C2c3, Cas12b/C2c1, Cas12c/C2c3, SpCas9(K855A), eSpCas9(1.1), SpCas9-HF1, hyper accurate Cas9 variant (HypaCas9), Cas D, and homologues, modified or engineered variants, mutants, and/or functional fragments thereof.

[0223] A Cas polypeptide may be from any suitable organism. Non-limiting examples include Streptococcus pyogenes, Streptococcus thermophilus, Streptococcus sp., Staphylococcus aureus, Nocardiopsis dassonvillei, Streptomyces pristinae spiralis, Streptomyces viridochromo genes, Streptomyces viridochromogenes, Streptosporangium roseum, Streptosporangium roseum, AlicyclobacHlus acidocaldarius, Bacillus pseudomycoides, Bacillus selenitireducens, Exiguobacterium sibiricum, Lactobacillus delbrueckii, Lactobacillus salivarius, Microscilla marina, Burkholderiales bacterium, Polaromonas naphthalenivorans, Polaromonas sp., Crocosphaera watsonii, Cyanothece sp., Microcystis aeruginosa, Pseudomonas aeruginosa, Synechococcus sp., Acetohalobium arabaticum, Ammonifex degensii, Caldicelulosiruptor becscii, Candidatus Desulforudis, Clostridium botulinum, Clostridium difficile, Finegoldia magna, Natranaerobius thermophilus, Pelotomaculum thermopropionicum, Acidithiobacillus caldus, Acidithiobacillus ferrooxidans, Allochromatium vinosum, Marinobacter sp., Nitrosococcus halophilus, Nitrosococcus watsoni, Pseudoalteromonas haloplanktis, Ktedonobacter racemifer, Methanohalobium evestigatum, Anabaena variabilis, Nodularia spumigena, Nostoc sp., Arthrospira maxima, Arthrospira platensis, Arthrospira sp., Lyngbya sp., Microcoleus chthonoplastes, Oscillatoria sp., Petrotoga mobilis, Thermosipho africanus, Acaryochloris marina, Leptotrichia shahii, and Francisella novicida. In some aspects, the organism is Streptococcus pyogenes (S. pyogenes). In some aspects, the organism is Staphylococcus aureus (S. aureus). In some aspects, the organism is Streptococcus thermophilus (S. thermophilus). In some aspects, the organism is Staphylococcus lugdunensis (S. lugdunensis).

[0224] A Cas protein can be derived from a variety of bacterial species including, but not limited to, Veillonella atypical, Fusobacterium nucleatum, Filifactor alocis, Solobacterium moorei, Coprococcus catus, Treponema denticola, Peptoniphilus duerdenii, Catenibacterium mitsuokai, Streptococcus mutans, Listeria innocua, Staphylococcus pseudintermedius, Acidaminococcus intestine, Olsenella uli, Oenococcus kitaharae, Bifidobacterium bifidum, Lactobacillus rhamnosus, Lactobacillus gasseri, Finegoldia magna, Mycoplasma mobile, Mycoplasma gallisepticum, Mycoplasma ovipneumoniae, Mycoplasma canis, Mycoplasma synoviae, Eubacterium rectale, Streptococcus thermophilus, Eubacterium dolichum, Lactobacillus coryniformis subsp. torquens, Ilyobacter polytropus, Ruminococcus albus, Akkermansia muciniphila, Acidothermus cellulolyticus, Bifidobacterium longum, Bifidobacterium dentium, Corynebacterium diphtheria, Elusimicrobium minutum, Nitratifractor salsuginis, Sphaerochaeta globus, Fibrobacter succinogenes subsp. succinogenes, Bacteroides fragilis, Capnocytophaga ochracea, Rhodopseudomonas palustris, Prevotella micans, Prevotella ruminicola, Flavobacterium columnare, Aminomonas paucivorans, Rhodospirillum rubrum, Candidatus Puniceispirillum marinum, Verminephrobacter eiseniae, Ralstonia syzygii, Dinoroseobacter shibae, Azospirillum, Nitrobacter hamburgensis, Bradyrhizobium, Wolinella succinogenes, Campylobacter jejuni subsp. jejuni, Helicobacter mustelae, Bacillus cereus, Acidovorax ebreus, Clostridium perfringens, Parvibaculum lavamentivorans, Roseburia intestinalis, Neisseria meningitidis, Pasteurella multocida subsp. Multocida, Sutterella wadsworthensis, proteobacterium, Legionella pneumophila, Parasutterella excrementihominis, Wolinella succinogenes, and Francisella novicida.

[0225] A Cas protein as used herein may be a wildtype or a modified form of a Cas protein. A Cas protein can be an active variant, inactive variant, or fragment of a wild type or modified Cas protein. A Cas protein as described herein may comprise an amino acid change such as a deletion, insertion, substitution, variant, mutation, fusion, chimera, or any combination thereof relative to a wild-type version of the Cas protein. A Cas protein may be a polypeptide with at least about 5%, 10%, 20%, 30%, 40%, 50%, 60%, 70%, 80%, 90%, 91%, 92%, 93%, 94%, 95%, 96%, 97%, 98%, 99%, or 100% sequence identity or sequence similarity to a wild type exemplary Cas protein. A Cas protein may be a polypeptide with at most about 5%, 10%, 20%, 30%, 40%, 50%, 60%, 70%, 80%, 90%, 100% sequence identity and/or sequence similarity to a wild type exemplary Cas protein. A Cas protein comprise an amino acid sequence that has no more than 1, 2, 3, 4, 5, 6, 7, 8, 9, 10, 11, 12, 13, 14, 15, 16, 17, 18, 19, 20, 21, 22, 23, 24, 25, 26, 27, 28, 29, 30, 31, 32, 33, 34, 35, 36, 37, 38, 39, or 40 differences e.g., mutations e.g., deletions or substitutions compared to a wild type exemplary Cas protein. Variants or fragments can comprise at least about 5%, 10%, 20%, 30%, 40%, 50%, 60%, 70%, 80%, 90%, 91%, 92%, 93%, 94%, 95%, 96%, 97%, 98%, 99%, or 100% sequence identity or sequence similarity to a wild type or modified Cas protein or a portion thereof. Variants or fragments can be targeted to a nucleic acid locus in complex with a guide nucleic acid while lacking nucleic acid cleavage activity.

[0226] A Cas protein may comprise one or more nuclease domains, such as DNase domains. For example, a Cas9 protein may comprise a RuvC-like nuclease domain and/or an HNH-like nuclease domain. The RuvC and HNH domains may each cut a different strand of double-stranded DNA to make a double-stranded break in the DNA. A Cas protein may comprise only one nuclease domain (e.g., Cpf1 comprises RuvC domain but lacks HNH domain).

[0227] A Cas protein may comprise an ammo acid sequence having at least about 5%, 10%, 20%, 30%, 40%, 50%, 60%, 70%, 80%, 90%, 91%, 92%, 93%, 94%, 95%, 96%, 97%, 98%, 99%, or 100% sequence identity or sequence similarity to a nuclease domain (e.g., RuvC domain, HNH domain) of a wild-type Cas protein. A Cas protein comprise an amino acid sequence that has no more than 1, 2, 3, 4, 5, 6, 7, 8, 9, 10, 11, 12, 13, 14, 15, 16, 17, 18, 19, 20, 21, 22, 23, 24, 25, 26, 27, 28, 29, 30, 31, 32, 33, 34, 35, 36, 37, 38, 39, or 40 differences e.g., mutations e.g., deletions or substitutions compared to a a nuclease domain (e.g., RuvC domain, HNH domain) of a wild-type Cas protein.

[0228] A Cas protein may be modified to optimize regulation of gene expression. A Cas protein may be modified to increase or decrease nucleic acid binding affinity, nucleic acid binding specificity, and/or enzymatic activity. Cas proteins may also be modified to change any other activity or property of the protein, such as stability. For example, one or more nuclease domains of the Cas protein may be modified, deleted, or inactivated, or a Cas protein may be truncated to remove domains that are not essential for the function of the protein or to optimize (e g, enhance or reduce) the activity of the Cas protein for regulating gene expression.

[0229] A Cas protein may be a fusion protein. For example, a Cas protein may be fused to a cleavage domain, an epigenetic modification domain, a transcriptional activation domain, or a transcriptional repressor domain. A Cas protein may also be fused to a heterologous polypeptide providing increased or decreased stability. The fused domain or heterologous polypeptide may be located at the N-terminus, the C-terminus, or internally within the Cas protein.

[0230] A Cas protein may be provided in any form. For example, a Cas protein may be provided in the form of a protein, such as a Cas protein alone or complexed with a guide nucleic acid. A Cas protein may be provided in the form of a nucleic acid encoding the Cas protein, such as an RNA (e.g., messenger RNA (mRNA)) or DNA. The nucleic acid encoding the Cas protein may be codon optimized for efficient translation into protein in a particular cell or organism.

[0231] Nucleic acids encoding Cas proteins may be stably integrated in the genome of the cell. Nucleic acids encoding Cas proteins may be operably linked to a promoter active in the cell. Nucleic acids encoding Cas proteins may be operably linked to a promoter in an expression construct. Expression constructs may include any nucleic acid constructs capable of directing expression of a gene or other nucleic acid sequence of interest (e.g., a Cas gene) and which may transfer such a nucleic acid sequence of interest to a target cell. In some embodiments, the Cas molecule or Cas domain comprises a responsive intein. In some embodiments, a DNA binding domain may comprise a split Cas protein, e.g., a split Cas9. In some embodiments, a split refers to division into two or more fragments. In some embodiments, a split Cas9 protein may include an active nuclease, a nickase, and a nuclease-null Cas9 protein.

[0232] In some embodiments, a split Cas9 reconstitutes a full-length Cas9 protein at least 20%, at least 30%, at least 40%, at least 50%, at least 60%, at least 70%, at least 75%, at least 80%, at least 85%, at least 90%, at least 95%, at least 96%, at least 97%, at least 98%, at least 99%, or at least 100% efficiency compared to a Cas9 that is not split.

[0233] A Cas protein may comprise a modified form of a wild type Cas protein. The modified form of the wild type Cas protein may comprise an amino acid change (e.g., deletion, insertion, or substitution) that reduces the nucleic acid-cleaving activity of the Cas protein. For example, the modified form of the Cas protein may have less than 90%, less than 80%, less than 70%, less than 60%, less than 50%, less than 40%, less than 30%, less than 20%, less than 10%, less than 5%, or less than 1% of the nucleic acid-cleaving activity of the wild-type Cas protein (e.g., Cas9 from S. pyogenes). The modified form of Cas protein may have no substantial nucleic acid-cleaving activity. When a Cas protein is a modified form that has no substantial nucleic acid-cleaving activity, it may be referred to as enzymatically inactive and/or “dead” (abbreviated by “d”). A dead Cas protein (e.g., dCas, dCas9) may bind to a target polynucleotide but may not cleave the target polynucleotide. In some aspects, a dead Cas protein is a dead Cas9 protein.

[0234] Enzymatically inactive can refer to a polypeptide that can bind to a nucleic acid sequence in a polynucleotide in a sequence-specific manner but may not cleave a target polynucleotide. An enzymatically inactive site-directed polypeptide may comprise an enzymatically inactive domain (e.g. nuclease domain). Enzymatically inactive can refer to no activity. Enzymatically inactive may refer to substantially no activity. Enzymatically inactive can refer to essentially no activity. Enzymatically inactive can refer to an activity less than 1%, less than 2%, less than 3%, less than 4%, less than 5%, less than 6%, less than 7%, less than 8%, less than 9%, or less than 10% activity compared to a wild-type exemplary activity (e.g., nucleic acid cleaving activity, wild-type Cas9 activity).

[0235] One or a plurality of the nuclease domains (e.g., RuvC, HNH) of a Cas protein may be deleted or mutated so that they are no longer functional or comprise reduced nuclease activity. For example, in a Cas protein comprising at least two nuclease domains (e.g., Cas9), if one of the nuclease domains is deleted or mutated, the resulting Cas protein, known as a nickase, may generate a single-strand break at a CRISPR RNA (crRNA) recognition sequence within a double-stranded DNA but not a double-strand break. Such a nickase can cleave the complementary strand or the non-complementary strand but may not cleave both. If all of the nuclease domains of a Cas protein (e.g., both RuvC and HNH nuclease domains in a Cas9 protein; RuvC nuclease domain in a Cpf1 protein) are deleted or mutated, the resulting Cas protein may have a reduced or no ability to cleave both strands of a double-stranded target DNA. An example of a mutation that may convert a Cas9 protein into a nickase is a D10A (aspartate to alanine at position 10 of Cas9 as set forth in SEQ ID NO: 138) mutation in the RuvC domain of Cas9 from S. pyogenes. A mutation corresponding to the H840A amino acid substitution (histidine to alanine at amino acid position 840 as set forth in SEQ ID NO: 138) in the HNH domain of Cas9 from S. pyogenes may convert the Cas9 into a nickase. An example of a mutation that may convert a Cas9 protein into a dead Cas9 is a D10A (aspartate to alanine at position 10 of Cas9) mutation in the RuvC domain and H840A (histidine to alanine at amino acid position 840) in the HNH domain of Cas9 from S. pyogenes.

[0236] A dead Cas protein may comprise one or more mutations relative to a wild-type version of the protein. The mutation can result in less than 90%, less than 80%, less than 70%, less than 60%, less than 50%, less than 40%, less than 30%, less than 20%, less than 10%, less than 5%, or less than 1% of the nucleic acid-cleaving activity in one or more of the plurality of nucleic acid-cleaving domains of the wild-type Cas protein. The mutation may result in one or more of the plurality of nucleic acid-cleaving domains retaining the ability to cleave the complementary strand of the target nucleic acid but reducing its ability to cleave the non-complementary strand of the target nucleic acid. The mutation may result in one or more of the plurality of nucleic acid-cleaving domains retaining the ability to cleave the non-complementary strand of the target nucleic acid but reducing its ability to cleave the complementary strand of the target nucleic acid. The mutation may result in one or more of the plurality of nucleic acid-cleaving domains lacking the ability to cleave the complementary strand and the non-complementary strand of the target nucleic acid. The residues to be mutated in a nuclease domain may correspond to one or more catalytic residues of the nuclease. For example, residues in the wild type exemplary S. pyogenes Cas9 polypeptide such as Asp10, His840, Asn854 and Asn856 may be mutated to inactivate one or more of the plurality of nucleic acid-cleaving domains (e.g., nuclease domains). The residues to be mutated in a nuclease domain of a Cas protein may correspond to residues Asp10, His840, Asn854 and Asn856 in the wild type S. pyogenes Cas9 polypeptide, for example, as determined by sequence and/or structural alignment.

[0237] As non-limiting examples, one or more of amino acid residues D10, G12, G17, E762, H840, N854, N863, H982, H983, A984, D986, and/or A987 in a SpCas9 as set forth in SEQ ID NO: 138, or corresponding amino acid residues in another Cas9 protein may be mutated. For example, a Cas9 protein variant may comprise one or more of D10A, G12A, G17A, E762A, H840A, N854A, N863A, H982A, H983A, A984A, and/or D986A amino acid substitutions as set forth in SEQ ID NO: 138 or corresponding mutations. Mutations other than alanine substitutions can be suitable.

[0238] A D10A mutation may be combined with one or more of H840A, N854A, or N856A mutations to produce a Cas protein substantially lacking DNA cleavage activity (e.g., a dead Cas9 protein). A H840A mutation may be combined with one or more of D10A, N854A, or N856A mutations to produce a site-directed polypeptide substantially lacking DNA cleavage activity. A N854A mutation may be combined with one or more of H840A, D10A, or N856A mutations to produce a site-directed polypeptide substantially lacking DNA cleavage activity. A N856A mutation may be combined with one or more of H840A, N854A, or D10A mutations to produce a site-directed polypeptide substantially lacking DNA cleavage activity.

[0239] In some embodiments, the DNA-binding domain comprises a Cas protein domain that is a nickase. In some embodiments, compared to a wild type Cas protein, the Cas nickase comprises one or more amino acid substitutions in a nuclease domain that reduces or abolishes its double strand nuclease activity but retains DNA binding activity. In some embodiments, the Cas nickase comprises an amino acid substitution in a HNH domain. In some embodiments, the Cas nickase comprises an amino acid substitution in a RuvC domain. In some embodiments, the Cas nickase is a Cas9 nickase comprising one or more mutation in the HNH domain that reduces or abolishes nuclease activity of the HNH domain. Sequences of exemplary Cas9 nickase variants and corresponding prime editors are provided in Table 8. In some embodiments, the Cas9 nickase comprises one or more of amino acid substitutions corresponding to the nickase mutations as provided in Table 8 when aligned against the corresponding reference nuclease Cas9 sequence in Table 8.

[0240] A Cas protein domain provided herein can be a nuclease active variant, nuclease inactive variant, a nickase, or a functional variant or functional fragment of a wild type Cas protein. A Cas protein domain provided herein can comprise an amino acid change such as a deletion, insertion, substitution, fusion, chimera, or any combination thereof relative to a wild-type version of the Cas protein. A Cas protein can be a polypeptide with at least about 50%, 60%, 70%, 80%, 90%, 91%, 92%, 93%, 94%, 95%, 96%, 97%, 98%, 99%, or 100% sequence identity or sequence similarity to an exemplary Cas protein domain provided herein.

[0241] A Cas protein domain may be a fusion protein. For example, a Cas protein domain provided herein can be fused to a cleavage domain, an epigenetic modification domain, a transcriptional regulation domain, or a polymerase domain. A Cas domain protein can also be fused to a heterologous polypeptide providing increased or decreased stability. The fused domain or heterologous polypeptide can be located at the N-terminus, the C-terminus, or internally within the Cas protein domain.

[0242] As described herein, the Cas protein domain may be between 800 and 1500 amino acids in length, between 1400 and 900 amino acids in length, or at least 1000 and 1300 amino acids in length. The Cas9 protein domain may be at least 800 amino acids in length, at least 900 amino acids in length, at least 1000 amino acids in length, at least 1100 amino acids in length, or at least 1200 amino acids in length. In some embodiments, the Cas9 protein domain is 1057 amino acids in length. In some embodiments, the Cas protein domain is 1069 amino acids in length. In some embodiments, the Cas protein domain is 1369 amino acids in length.

[0243] In some embodiments, the Cas protein domain recognizes the PAM sequence “NGA,” wherein N is any nucleotide. In some embodiments, the Cas protein domain recognizes the PAM sequence “NGN,” wherein N is any nucleotide. In some embodiments, the Cas protein domain recognizes the PAM sequence “NRN,” wherein N is any nucleotide. In some embodiments, the Cas protein domain recognizes the PAM sequence “NNGRRT,” wherein N is any nucleotide. In some embodiments, the Cas protein domain recognizes the PAM sequence “NNGG,” wherein N is any nucleotide.

[0244] In some embodiments, a prime editor provided herein comprises a Cas protein domain that contains modifications that allow altered PAM recognition. In prime editing using a Cas-protein-based prime editor, a “protospacer adjacent motif (PAM)”, PAM sequence, or PAM-like motif, may be used to refer to a short DNA sequence immediately following the protospacer sequence on the PAM strand of the target gene. In some embodiments, the PAM is recognized by the Cas nuclease in the prime editor during prime editing. In certain embodiments, the PAM is required for target binding of the Cas protein domain. The specific PAM sequence required for Cas protein domain recognition may depend on the specific type of the Cas protein. A PAM can be 1, 2, 3, 4, 5, 6, 7, 8, 9, 10 or more nucleotides in length. In some embodiments, a PAM is between 2-6 nucleotides in length. In some embodiments, the PAM can be a 5′ PAM (i.e., located upstream of the 5′ end of the protospacer). In other embodiments, the PAM can be a 3′ PAM (i.e., located downstream of the 5′ end of the protospacer). In some embodiments, the Cas protein of a prime editor recognizes a canonical PAM, for example, a SpCas9 recognizes 5′-NGG-3′ PAM.

[0245] In some embodiments, a prime editor comprises a DNA binding domain that has nickase activity to cleave a first strand of a double stranded target DNA sequence. In some cases, the prime editor may cleave a first stand of a double stranded target DNA sequence. In some cases, the first strand of a double stranded target DNA sequence cleavable a prime editor may comprise a PAM sequence. In one case, when the first strand of a double stranded target DNA sequence cleavable by a a prime editor comprises a PAM sequence, the second strand of the double stranded target DNA sequence may comprise a complement of the PAM sequence.

[0246] In some embodiments, a Cas protein domain comprises one or more nuclease domains. A Cas protein domain may comprise an amino acid sequence having at least about 50%, 60%, 70%, 80%, 90%, 91%, 92%, 93%, 94%, 95%, 96%, 97%, 98%, 99%, or 100% sequence identity to a nuclease domain of a wild-type Cas protein. In some embodiments, a Cas protein domain comprises a single nuclease domain

[0247] In some embodiments, a prime editor comprises a Cas protein domain that can bind to the target gene in a sequence-specific manner but lacks or has abolished nuclease activity and may not cleave either strand of a double stranded DNA in a target gene. Abolished activity or lacking activity can refer to an enzymatic activity less than 1%, less than 2%, less than 3%, less than 4%, less than 5%, less than 6%, less than 7%, less than 8%, less than 9%, or less than 10% activity compared to a wild-type exemplary activity (e.g., wild-type Cas9 nuclease activity).

[0248] Exemplary Cas protein domains are shown in Table 8. In some embodiments, the Cas protein domain is at least 85%, at least 86%, at least 87%, at least 88%, at least 89%, at least 90%, at least 91%, at least 92%, at least 93%, at least 94%, at least 95%, at least 96%, at least 97%, at least 98%, at least 99% identical to a sequence provided in Table 8. In some embodiments, the Cas protein domain comprises an amino acid sequence identical to any one of the sequences set forth in SEQ ID NO: 138-146, 494, 858, 1100 (e.g., Table 8). It should be appreciated that for each of the variants provided, the Cas protein comprises one or more of the amino acid substitutions compared to a wild type Cas protein sequence, for example, the Cas9 as set forth in SEQ ID NO: 138 or SEQ ID NO: 858.

[0249] In some embodiments, a Cas protein is a Class 2 Cas protein. In some embodiments, a Cas protein is a type II Cas protein. In some embodiments, the Cas protein is a Cas9 protein, a modified version of a Cas9 protein, or derived from a Cas9 protein. For example, a Cas9 protein lacking substantial cleavage activity. In some embodiments, the Cas9 protein is a Cas9 protein from S. pyogenes (e.g., SwissProt accession number Q99ZW2). In some embodiments, the Cas9 protein is a Cas9 from S. aureus (e.g., SwissProt accession number J7RUA5). In some embodiments, the Cas9 protein is a modified version of a Cas9 protein from S. pyogenes or S. Aureus. In some embodiments, the Cas9 protein is derived from a Cas9 protein from S. pyogenes or S. Aureus. For example, a S. pyogenes or S. aureus Cas9 protein lacking substantial cleavage activity.

[0250] In some instances, a Cas9 protein may comprise a wildtype Cas9 protein or a variant Cas9 protein, functional portion of any of these, fusion protein of any of these, or any combinations thereof. In some cases, a Cas9 polypeptide may comprise a wildtype Cas9 polypeptide. In some cases, a Cas9 polypeptide may comprise a variant Cas9 polypeptide.

[0251] In some embodiments, the DNA binding domain comprises a nuclease-active Cas domain, a Cas nickase (nCas) domain, e.g., nCas9 domain, or a nuclease-5 inactive Cas (dCas) domain, e.g., dCas9 domain. In some embodiments, the DNA binding domain comprises a Cas9 domain of Cas9 (e.g., dCas9 and nCas9), Cas12a/Cpf1, Cas12b/C2c1, Cas12c/C2c3, Cas12d/CasY, Cas12e/CasX, Cas12g, Cas12h, or Cas12i or a mutant, functional fragment, or variant thereof.

[0252] In some instances, a Cas9 polypeptide of a prime editor may comprise a nickase activity. In some cases, the Cas9 polypeptide may comprise a Cas9 nickase. In some cases, a wildtype Cas9 polypeptide may cleave both strands of a double stranded target DNA sequence. In some cases, a Cas9 nickase may cleave one strand of a double stranded target DNA sequence. In some cases, a Cas9 nickase may comprise a mutation in a wildtype Cas9 polypeptide. Such mutation may comprise any mutation described herein.

[0253] In some embodiments, the Cas9 protein domain recognizes a PAM sequence flanked by a spacer. In some embodiments, the spacer is on the 5′ end of the PAM sequence. In some embodiments, the spacer is on the 3′ end of the PAM sequence. In some embodiments, the spacer is 10, 11, 12, 13, 14, 15, 16, 17, 18, 19, 20, 21, 22, 23, 24, 25, 26, 27, 28, 29, or 30 nucleotides in length.

[0254] In some embodiments, a Cas9 protein domain of a prime editor may comprise an alanine-to-histidine substitution at 840th position (H840A), an aspartic acid-to-alanine substitution at the 10th position (D10A), or at the corresponding position of the wildtype Cas9 polypeptide. In some cases, a Cas9 polypeptide of a prime editor may comprise mutation H840A of a SpCas9 polypeptide. In some cases, a Cas9 polypeptide of a prime editor may comprise mutation H840A or at the corresponding position of the wildtype Cas9 polypeptide. In some cases, a Cas9 polypeptide of a prime editor may comprise mutation D10A, or at the corresponding position of the wildtype Cas9 polypeptide. In some cases, a Cas9 polypeptide of a prime editor may comprise mutation D10A of a wildtype SpCas9 polypeptide. In other cases, a Cas9 polypeptide of a prime editor may comprise H840A and D10A mutations, or at the corresponding position of the wildtype Cas9 polypeptide.

[0255] A wildtype Cas9 polypeptide may comprise a RuvC domain and an HNH domain. A Cas9 polypeptide with a functional RuvC domain and a functional HNH domain may cleave both strands of a double stranded target DNA sequence. A Cas9 polypeptide with only one functional RuvC domain or one functional HNH domain may cleave one strand of a double stranded target DNA sequence. A Cas9 polypeptide without one functional RuvC domain and one functional HNH domain may not cleave any strand of a double stranded target DNA sequence.

[0256] In some embodiments, a Cas9 polypeptide may comprise a RuvC domain. In some cases, a mutation in the RuvC domain of a Cas9 polypeptide may comprise mutation D10A. A mutation in the RuvC domain of a Cas9 polypeptide, in some cases, may comprise mutation D10A or structural equivalent thereof of a wildtype SpCas9 polypeptide. In other cases, a mutation in the RuvC domain of a Cas9 polypeptide, in some cases, may comprise mutation H983A, D986A, or E762A. A Cas9 polypeptide comprising a wildtype RuvC domain may cleave a second strand of a double stranded target DNA sequence. Such a second strand of a double stranded target DNA sequence, in some cases, may not comprise a PAM sequence. In some cases, a second strand of a double stranded target DNA sequence, cleavable by a Cas9 polypeptide comprising a wildtype RuvC domain, may comprise complement of a PAM sequence. A Cas9 polypeptide comprising a mutation in the RuvC domain may not cleave the second strand of a double stranded target DNA sequence.

[0257] In some embodiments, a Cas9 polypeptide may comprise an HNH domain. In some cases, a mutation in the HNH domain of a Cas9 polypeptide may comprise mutation H840A. A mutation in the HNH domain of a Cas9 polypeptide, in some cases, may comprise mutation H840A or structural equivalent thereof of a wildtype SpCas9 polypeptide. In other cases, a mutation in the HNH domain of a Cas9 polypeptide, in some cases, may comprise mutation N863A. A Cas9 polypeptide comprising a wildtype HNH domain may cleave a first strand of a double stranded target DNA sequence. Such a first strand of a double stranded target DNA sequence, in some cases, may comprise a PAM sequence. In some cases, a second strand of a double stranded target DNA sequence, cleavable by a Cas9 polypeptide comprising a wildtype HNH domain, may comprise complement of a PAM sequence. A Cas9 polypeptide comprising a mutation in the HNH domain may not cleave the first strand of a double stranded target DNA sequence. In certain instances, the Cas9 polypeptide in a prime editor is a Cas9 nickase comprising a mutation in the HNH domain which inactivates the HNH nuclease activity. For example, a prime editor may comprise a Cas9 nickase that comprises a H840X mutation and/or a N863X mutation, wherein X is any amino acid other than the wild type amino acid. In certain embodiments, the Cas9 nickase comprises a H840A or N863A or a combination thereof. In some instances, the Cas9 polypeptide comprises a RuvC domain. In some embodiments, the Cas9 polypeptide may be a nickase that comprises a RuvC domain and not an HNH domain.

[0258] In some embodiments, a Cas9 protein may comprise a Cas9 protein from Streptococcus pyogenes (Sp), Staphylococcus aureus (Sa), Streptococcus canis (Sc), Streptococcus thermophilus (St), Neisseria meningitidis (Nm), Campylobacter jejuni (Cj), Francisella novicida (Fn), or Treponema denticola (Td). In some cases, a Cas9 polypeptide may comprise a SpCas9 polypeptide. In some cases, a Cas9 polypeptide may comprise a SaCas9 polypeptide. In some cases, a Cas9 polypeptide may comprise a ScCas9 polypeptide. In some cases, a Cas9 polypeptide may comprise a StCas9 polypeptide. In some cases, a Cas9 polypeptide may comprise a NmCas9 polypeptide. In some cases, a Cas9 polypeptide may comprise a CjCas9 polypeptide. In some cases, a Cas9 polypeptide may comprise a FnCas9 polypeptide. In some cases, a Cas9 polypeptide may comprise a TdCas9 polypeptide.

[0259] An exemplary Streptococcus pyogenes Cas9 (SpCas9) amino acid sequence is provided below:

(SEQ ID NO: 138)
[sequence omitted]

[0260] An exemplary Staphylococcus aureus (SaCas9) amino acid sequence is provided below:

(SEQ ID NO: 140)
MKRNYILGLDIGITSVGYGIIDYETRDVIDAGVRLFKEANVENNEGRRS
KRGARRLKRRRRHRIQRVKKLLFDYNLLTDHSELSGINPYEARVKGLSQ
KLSEEEFSAALLHLAKRRGVHNVNEVEEDTGNELSTKEQISRNSKALEE
KYVAELQLERLKKDGEVRGSINRFKTSDYVKEAKQLLKVQKAYHQLDQS
FIDTYIDLLETRRTYYEGPGEGSPFGWKDIKEWYEMLMGHCTYFPEELR
SVKYAYNADLYNALNDLNNLVITRDENEKLEYYEKFQIIENVFKQKKKP
TLKQIAKEILVNEEDIKGYRVTSTGKPEFTNLKVYHDIKDITARKEIIE
NAELLDQIAKILTIYQSSEDIQEELTNLNSELTQEEIEQISNLKGYTGT
HNLSLKAINLILDELWHTNDNQIAIFNRLKLVPKKVDLSQQKEIPTTLV
DDFILSPVVKRSFIQSIKVINAIIKKYGLPNDIIIELAREKNSKDAQKM
INEMQKRNRQTNERIEEIIRTTGKENAKYLIEKIKLHDMQEGKCLYSLE
AIPLEDLLNNPFNYEVDHIIPRSVSFDNSFNNKVLVKQEEASKKGNRTP
FQYLSSSDSKISYETFKKHILNLAKGKGRISKTKKEYLLEERDINRFSV
QKDFINRNLVDTRYATRGLMNLLRSYFRVNNLDVKVKSINGGFTSFLRR
KWKFKKERNKGYKHHAEDALIIANADFIFKEWKKLDKAKKVMENQMFEE
KQAESMPEIETEQEYKEIFITPHQIKHIKDFKDYKYSHRVDKKPNRELI
NDTLYSTRKDDKGNTLIVNNLNGLYDKDNDKLKKLINKSPEKLLMYHHD
PQTYQKLKLIMEQYGDEKNPLYKYYEETGNYLTKYSKKDNGPVIKKIKY
YGNKLNAHLDITDDYPNSRNKVVKLSLKPYRFDVYLDNGVYKFVTVKNL
DVIKKENYYEVNSKCYEEAKKLKKISNQAEFIASFYNNDLIKINGELYR
VIGVNNDLLNRIEVNMIDITYREYLENMNDKRPPRIIKTIASKTQSIKK
YSTDILGNLYEVKSKKHPQIIKK

[0261] An exemplary Staphylococcus aureus (SaCas9) amino acid sequence is provided below:

(SEQ ID NO: 858)
MKRNYILGLDIGITSVGYGIIDYETRDVIDAGVRLFKEANVENNEGRRS
KRGARRLKRRRRHRIQRVKKLLFDYNLLTDHSELSGINPYEARVKGLSQ
KLSEEEFSAALLHLAKRRGVHNVNEVEEDTGNELSTKEQISRNSKALEE
KYVAELQLERLKKDGEVRGSINRFKTSDYVKEAKQLLKVQKAYHQLDQS
FIDTYIDLLETRRTYYEGPGEGSPFGWKDIKEWYEMLMGHCTYFPEELR
SVKYAYNADLYNALNDLNNLVITRDENEKLEYYEKFQIIENVFKQKKKP
TLKQIAKEILVNEEDIKGYRVTSTGKPEFTNLKVYHDIKDITARKEIIE
NAELLDQIAKILTIYQSSEDIQEELTNLNSELTQEEIEQISNLKGYTGT
HNLSLKAINLILDELWHTNDNQIAIFNRLKLVPKKVDLSQQKEIPTTLV
DDFILSPVVKRSFIQSIKVINAIIKKYGLPNDIIIELAREKNSKDAQKM
INEMQKRNRQTNERIEEIIRTTGKENAKYLIEKIKLHDMQEGKCLYSLE
AIPLEDLLNNPFNYEVDHIIPRSVSFDNSFNNKVLVKQEENSKKGNRTP
FQYLSSSDSKISYETFKKHILNLAKGKGRISKTKKEYLLEERDINRFSV
QKDFINRNLVDTRYATRGLMNLLRSYFRVNNLDVKVKSINGGFTSFLRR
KWKFKKERNKGYKHHAEDALIIANADFIFKEWKKLDKAKKVMENQMFEE
KQAESMPEIETEQEYKEIFITPHQIKHIKDFKDYKYSHRVDKKPNRELI
NDTLYSTRKDDKGNTLIVNNLNGLYDKDNDKLKKLINKSPEKLLMYHHD
PQTYQKLKLIMEQYGDEKNPLYKYYEETGNYLTKYSKKDNGPVIKKIKY
YGNKLNAHLDITDDYPNSRNKVVKLSLKPYRFDVYLDNGVYKFVTVKNL
DVIKKENYYEVNSKCYEEAKKLKKISNQAEFIASFYNNDLIKINGELYR
VIGVNNDLLNRIEVNMIDITYREYLENMNDKRPPRIIKTIASKTQSIKK
YSTDILGNLYEVKSKKHPQIIKKG

[0262] In some embodiments, a prime editor comprises a Cas9 protein from Staphylococcus lugdunensis (Slu Cas9). An exemplary amino acid sequence of a Staphylococcus lugdunensis (Slu Cas9) is provided in SEQ ID NO: 139.

(SEQ ID NO: 139)
MNQKFILGLDIGITSVGYGLIDYETKNIIDAGVRLFPEANVENNEGRRS
KRGSRRLKRRRIHRLERVKKLLEDYNLLDQSQIPQSTNPYAIRVKGLSE
ALSKDELVIALLHIAKRRGIHKIDVIDSNDDVGNELSTKEQLNKNSKLL
KDKFVCQIQLERMNEGQVRGEKNRFKTADIIKEIIQLLNVQKNFHQLDE
NFINKYIELVEMRREYFEGPGKGSPYGWEGDPKAWYETLMGHCTYFPDE
LRSVKYAYSADLFNALNDLNNLVIQRDGLSKLEYHEKYHIIENVFKQKK
KPTLKQIANEINVNPEDIKGYRITKSGKPQFTEFKLYHDLKSVLFDQSI
LENEDVLDQIAEILTIYQDKDSIKSKLTELDILLNEEDKENIAQLTGYT
GTHRLSLKCIRLVLEEQWYSSRNQMEIFTHLNIKPKKINLTAANKIPKA
MIDEFILSPVVKRTFGQAINLINKIIEKYGVPEDIIIELARENNSKDKQ
KFINEMQKKNENTRKRINEIIGKYGNQNAKRLVEKIRLHDEQEGKCLYS
LESIPLEDLLNNPNHYEVDHIIPRSVSFDNSYHNKVLVKQSENSKKSNL
TPYQYFNSGKSKLSYNQFKQHILNLSKSQDRISKKKKEYLLEERDINKF
EVQKEFINRNLVDTRYATRELTNYLKAYFSANNMNVKVKTINGSFTDYL
RKVWKFKKERNHGYKHHAEDALIIANADFLFKENKKLKAVNSVLEKPEI
ESKQLDIQVDSEDNYSEMFIIPKQVQDIKDFRNFKYSHRVDKKPNRQLI
NDTLYSTRKKDNSTYIVQTIKDIYAKDNTTLKKQFDKSPEKFLMYQHDP
RTFEKLEVIMKQYANEKNPLAKYHEETGEYLTKYSKKNNGPIVKSLKYI
GNKLGSHLDVTHQFKSSTKKLVKLSIKPYRFDVYLTDKGYKFITISYLD
VLKKDNYYYIPEQKYDKLKLGKAIDKNAKFIASFYKNDLIKLDGEIYKI
IGVNSDTRNMIELDLPDIRYKEYCELNNIKGEPRIKKTIGKKVNSIEKL
TTDVLGNVFTNTQYTKPQLLFKRGN

[0263] The Slu Cas9 may comprise one or more mutations that modifies or reduces its nuclease activity. For example, the Slu Cas9 may comprise a mutation in a HNH domain, resulting in a Slu Cas9 nickase. In some embodiments a sluCas9 recognizes a “NNGG” PAM.

[0264] In some embodiments, a Cas9 is a modified Cas9; e.g., synthetic RNA-guided nucleases (sRGNs), e.g., modified by DNA family shuffling, e.g., sRGN3.1, sRGN3.3. In some embodiments, the DNA family shuffling comprises, fragmentation and reassembly of parental Cas9 genes, e.g., one or more of Cas9s from Staphylococcus hyicus (Shy), Staphylococcus lugdunensis (Slu), Staphylococcus microti (Smi), and Staphylococcus pasteuri (Spa). In some embodiments, a modified sluCas9 shows increased editing efficiency and/or specificity relative to a sluCas9 that is not modified. In some embodiments, a modified Cas9, e.g., a sRGN shows at least 10%, at least 20%, at least 30%, at least 40%, at least 50%, at least 60%, at least 70%, at least 80%, at least 90%, at least 100%, at least 150%, at least 200%, at least 300%, at least 400%, at least 500%, at least 600%, at least 700%, at least 800%, at least 900%, or at least 1000% increase in editing efficiency compared to a Cas9 that is not modified. In some embodiments, a Cas9, e.g., a sRGN shows at least 10%, at least 20%, at least 30%, at least 40%, at least 50%, at least 60%, at least 70%, at least 80%, at least 90%, at least 100%, at least 150%, at least 200%, at least 300%, at least 400%, at least 500%, at least 600%, at least 700%, at least 800%, at least 900%, or at least 1000% increase in specificity compared to a Cas9 that is not modified. In some embodiments, a Cas9, e.g., a sRGN shows at least 10%, at least 20%, at least 30%, at least 40%, at least 50%, at least 60%, at least 70%, at least 80%, at least 90%, at least 100%, at least 150%, at least 200%, at least 300%, at least 400%, at least 500%, at least 600%, at least 700%, at least 800%, at least 900%, or at least 1000% increase in cleavage activity compared to a Cas9 that is not modified. In some embodiments, a Cas9, e.g., a sRGN shows ability to cleave a 5′-NNGG-3′ PAM-containing target.

[0265] Cas9 polypeptides and variants are also contemplated. In some embodiments, the N-terminal methionine is removed from a Cas protein domain provided herein. In some embodiments, a Cas9 polypeptide can comprise mutation A61R, L111R, D1135V, R221K, A262T, R324L, N394K, S4091, S4091, E427G, E480K, M495V, N497A, Y515N, K526E, F539S, E543D, R654L, R661A, R661L, R691A, N692A, M694A, M6941, Q695A, H698A, R753G, M7631, K848A, K890N, Q926A, K1003A, R1060A, L1111R, R1114G, D1135E, D1135L, D1135N, S1136W, V1139A, D1180G, G1218K, G1218R, G1218S, E1219Q, E1219V, E1219V, Q1221H, P1249S, E1253K, N1317R, A1320V, P1321S, A1322R, I1322V, D1332G, R1332N, A1332R, R1333K, R1333P, R1335L, R1335Q, R1335V, T1337N, T1337R, S1338T, H1349R, or any combinations thereof of a wildtype SpCas9 polypeptide.

[0266] In some embodiments, a Cas9 polypeptide of a prime editor may comprise a Cas9 polypeptide other than a SpCas9 polypeptide. In some cases, a SaCas9 polypeptide of a prime editor may comprise a wildtype SaCas9 polypeptide. In some cases, a SaCas9 polypeptide of a prime editor may comprise a variant SaCas9 polypeptide. In some cases, a SaCas9 polypeptide may comprise mutation E782K, N968K, or R1015H. In some cases, a FnCas9 polypeptide may comprise a wildtype FnCas9 polypeptide. In some cases, a FnCas9 polypeptide may comprise a variant FnCas9 polypeptide. In some cases, a FnCas9 polypeptide may comprise mutation E1369R, E1449H, or R1556A. In some cases, a StCas9 may comprise a Stl Cas9 or a St3 Cas9 polypeptide. In some cases, a ScCas9 polypeptide may comprise a wildtype ScCas9 polypeptide. In some cases, a ScCas9 polypeptide may comprise a variant ScCas9 polypeptide. In some cases, a ScCas9 polypeptide may comprise mutation 1367K, G368D, 1369K, H371L, T375S, T376G, or T1227K.

[0267] In some instances, the DNA binding domain of a prime editor, e.g., Cas9 domain, may be configured to cleave the first strand of a double stranded target DNA sequence at a cleavage site upstream of a PAM sequence. In some cases, the second polypeptide of a prime editor may be configured to cleave the first strand of a double stranded target DNA sequence at a cleavage site 5′ of a PAM sequence. In some cases, the cleavage site is at least 1, at least 2, at least 3, at least 4, at least 5, at least 6, at least 7, at least 8, at least 9 nucleotides upstream or 5′ of the PAM sequence. In some cases, the cleavage site is at least 1 nucleotide upstream or 5′ of the PAM sequence. In some cases, the cleavage site is at least 2 nucleotides upstream or 5′ of the PAM sequence. In some cases, the cleavage site is at least 3 nucleotides upstream or 5′ of the PAM sequence. In some cases, the cleavage site is at least 4 nucleotides upstream or 5′ of the PAM sequence. In some cases, the cleavage site is at least 5 nucleotides upstream or 5′ of the PAM sequence. In some cases, the cleavage site is at least 6 nucleotides upstream or 5′ of the PAM sequence. In some cases, the cleavage site is at least 7 nucleotides upstream or 5′ of the PAM sequence. In some cases, the cleavage site is at least 8 nucleotides upstream or 5′ of the PAM sequence. In some cases, the cleavage site is at least 9 nucleotides upstream or 5′ of the PAM sequence. In some cases, the cleavage site is from 10 to 20 nucleotides, from 15 to 25 nucleotides, from 20 to 30 nucleotides, from 25 to 35 nucleotides, from 30 to 40 nucleotides, from 35 to 45, or from 45 to 50 nucleotides upstream or 5′ of the PAM sequence.

[0268] In some embodiments, a PAM sequence in a first strand of a double stranded target DNA sequence may comprise NGG, wherein N is A, C, T, or G and applied to other PAM sequence described herein. In some cases, a prime editor may cleave a double stranded target DNA sequence comprising NGG as a PAM sequence in the first strand of the double stranded target DNA sequence. In some cases, a prime editor comprising a second polypeptide may cleave a double stranded target DNA sequence comprising NGG as a PAM sequence in the first strand of the double stranded target DNA sequence. In some cases, a prime editor comprising a Cas9 polypeptide as a second polypeptide may cleave a double stranded target DNA sequence comprising NGG as a PAM sequence in the first strand of the double stranded target DNA sequence. In some cases, a prime editor comprising a wildtype SpCas9 polypeptide as a second polypeptide may cleave a double stranded target DNA sequence comprising NGG as a PAM sequence in the first strand of the double stranded target DNA sequence. In some cases, a SpCas9 polypeptide may be modified to alter the PAM specificity. In some cases, a Cas9 polypeptide comprising mutations D1135V, R1335Q, and T1337R may cleave a double stranded target DNA sequence comprising NGAN or NGNG as a PAM sequence in the first strand of the double stranded target DNA sequence. In some cases, a SpCas9 polypeptide comprising mutations D1135E, R1335Q, and T1337R may cleave a double stranded target DNA sequence comprising NGAG as a PAM sequence in the first strand of the double stranded target DNA sequence. In some cases, a SpCas9 polypeptide comprising mutations D1135V, G1218R, R1335E, and T1337R may cleave a double stranded target DNA sequence comprising NGCG as a PAM sequence in the first strand of the double stranded target DNA sequence. In some cases, a SpCas9 polypeptide comprising mutation D1135E may have enhanced specificity to NGG when compared to a wildtype SpCas9 polypeptide. In some cases, a SaCas9 may recognize NGRRT or NGRRN as a PAM sequence. In some cases, a NmCas9 may recognize NNNNGATT as a PAM sequence. In some cases, a StCas9 may recognize NNAGAAW as a PAM sequence. In some cases, a NmCas9 may recognize NNNNGATT as a PAM sequence. In some cases, a TdCas9 may recognize NAAAAC as a PAM sequence.

[0269] An exemplary sequence of a Cas9 recognizing a NG PAM sequence is provided below:

(SEQ ID NO: 1100)
MDKKYSIGLDIGTNSVGWAVITDEYKVPSKKFKVLGNTDRHSIKKNLIG
ALLFDSGETAEATRLKRTARRRYTRRKNRICYLQEIFSNEMAKVDDSFF
HRLEESFLVEEDKKHERHPIFGNIVDEVAYHEKYPTIYHLRKKLVDSTD
KADLRLIYLALAHMIKFRGHFLIEGDLNPDNSDVDKLFIQLVQTYNQLF
EENPINASGVDAKAILSARLSKSRRLENLIAQLPGEKKNGLFGNLIALS
LGLTPNFKSNFDLAEDAKLQLSKDTYDDDLDNLLAQIGDQYADLFLAAK
NLSDAILLSDILRVNTEITKAPLSASMIKRYDEHHQDLTLLKALVRQQL
PEKYKEIFFDQSKNGYAGYIDGGASQEEFYKFIKPILEKMDGTEELLVK
LNREDLLRKQRTFDNGSIPHQIHLGELHAILRRQEDFYPFLKDNREKIE
KILTFRIPYYVGPLARGNSRFAWMTRKSEETITPWNFEEVVDKGASAQS
FIERMTNFDKNLPNEKVLPKHSLLYEYFTVYNELTKVKYVTEGMRKPAF
LSGEQKKAIVDLLFKTNRKVTVKQLKEDYFKKIECFDSVEISGVEDRFN
ASLGTYHDLLKIIKDKDFLDNEENEDILEDIVLTLTLFEDREMIEERLK
TYAHLFDDKVMKQLKRRRYTGWGRLSRKLINGIRDKQSGKTILDFLKSD
GFANRNFMQLIHDDSLTFKEDIQKAQVSGQGDSLHEHIANLAGSPAIKK
GILQTVKVVDELVKVMGRHKPENIVIEMARENQTTQKGQKNSRERMKRI
EEGIKELGSQILKEHPVENTQLQNEKLYLYYLQNGRDMYVDQELDINRL
SDYDVDAIVPQSFLKDDSIDNKVLTRSDKNRGKSDNVPSEEVVKKMKNY
WRQLLNAKLITQRKFDNLTKAERGGLSELDKAGFIKRQLVETRQITKHV
AQILDSRMNTKYDENDKLIREVKVITLKSKLVSDFRKDFQFYKVREINN
YHHAHDAYLNAVVGTALIKKYPKLESEFVYGDYKVYDVRKMIAKSEQEI
GKATAKYFFYSNIMNFFKTEITLANGEIRKRPLIETNGETGEIVWDKGR
DFATVRKVLSMPQVNIVKKTEVQTGGFSKESIRPK

[0270] In some embodiments, a Cas protein domain provided herein comprises a Cas fragment that is a functional fragment of a Cas protein domain provided herein that retains one or more Cas activities. In some embodiments, the Cas fragment is at least 100 amino acids in length. In some embodiments, the fragment is at least 100, 150, 200, 250, 300, 350, 400, 450, 500, 550, 600, 650, 700, 750, 800, 850, 900, 950, 1000, 1050, 1100, 1150, 1200, 1250, or at least 1300 amino acids in length.

[0271] In some embodiments, a Cas9 domain may comprise an amino acid sequence comprising at least 85% identical (e.g., at least 86%, at least 87%, at least 88%, at least 89%, at least 90%, at least 91%, at least 92%, at least 93%, at least 94%, at least 95%, at least 96%, at least 97%, at least 98%, at least 99% identical, or 100% identical) to any one of the sequences set forth in: SEQ ID NOs:138-146 or 1100. In some embodiments, the Cas9 domain comprises an amino acid sequence that has no more than 1, 2, 3, 4, 5, 6, 7, 8, 9, 10, 11, 12, 13, 14, 15, 16, 17, 18, 19, or 20 differences e.g., mutations e.g., deletions or substitutions compared to any of the amino acid sequences set forth in SEQ ID NO: 138-146, 858, or 1100.

[0272] In some embodiments, a prime editor comprises a Cas protein domain that comprises a circular permutant Cas variant. For example, a Cas protein domain of a prime editor may be engineered such that the N-terminus and the C-terminus of a Cas protein domain (e.g., a Cas protein domain provided herein) are topically rearranged to retain the ability to bind DNA when complexed with a guide RNA (gRNA). An exemplary circular permutant configuration may be N-terminus-[original C-terminus]-[original N-terminus]-C-terminus. Any of the Cas9 proteins described herein, including any variant, ortholog, or naturally occurring Cas9 or equivalent thereof, may be reconfigured as a circular permutant variant.

[0273] In various embodiments, the circular permutants of a Cas protein domain may have the following structure: N-terminus-[original C-terminus]-[optional linker]-[original N-terminus]-C-terminus.

[0274] In some embodiments, the circular permutant can be formed by linking a C-terminal fragment of a Cas to an N-terminal fragment of a Cas, either directly or by using a linker, such as an amino acid linker. In some embodiments, The C-terminal fragment may correspond to the C-terminal 95% or more of the amino acids of a Cas protein domain provided herein, or the C-terminal 90%, 85%, 80%, 75%, 70%, 65%, 60%, 55%, 50%, 45%, 40%, 35%, 30%, 25%, 20%, 15%, 10%, or 5% or more of a Cas protein domain (e.g., as set forth Table 8). The N-terminal portion may correspond to the N-terminal 95% or more of the amino acids of a Cas protein domain provided herein, or the N-terminal 90%, 85%, 80%, 75%, 70%, 65%, 60%, 55%, 50%, 45%, 40%, 35%, 30%, 25%, 20%, 15%, 10%, or 5% or more of a Cas domain provided herein (e.g., as set forth Table 8).

[0275] In some embodiments, the circular permutant can be formed by linking a C-terminal fragment of a Cas protein domain provided herein to an N-terminal fragment of a Cas protein domain provided herein, either directly or by using a linker, such as an amino acid linker. In some embodiments, the C-terminal fragment that is rearranged to the N-terminus includes or corresponds to the C-terminal 30% or less of the amino acids of a Cas protein domain provided herein (e.g., as set forth Table 8). In some embodiments, the C-terminal fragment that is rearranged to the N-terminus, includes or corresponds to the C-terminal 30%, 29%, 28%, 27%, 26%, 25%, 24%, 23%, 22%, 21%, 20%, 19%, 18%, 17%, 16%, 15%, 14%, 13%, 12%, 11%, 10%, 9%, 8%, 7%, 6%, 5%, 4%, 3%, 2%, or 1% of the amino acids of a Cas protein domain provided herein (e.g., as set forth Table 8). In some embodiments, the C-terminal fragment that is rearranged to the N-terminus, includes or corresponds to the C-terminal 410 residues or less of a Cas protein domain provided herein (e.g., as set forth Table 8). In some embodiments, the C-terminal portion that is rearranged to the N-terminus, includes or corresponds to the C-terminal 410, 400, 390, 380, 370, 360, 350, 340, 330, 320, 310, 300, 290, 280, 270, 260, 250, 240, 230, 220, 210, 200, 190, 180, 170, 160, 150, 140, 130, 120, 110, 100, 90, 80, 70, 60, 50, 40, 30, 20, or 10 residues of a Cas protein domain provided herein (e.g., as set forth Table 8). In some embodiments, the C-terminal portion that is rearranged to the N-terminus includes or corresponds to the C-terminal 357, 341, 328, 120, or 69 residues of a Cas protein domain provided herein (e.g., as set forth Table 8).

[0276] Prime editors described herein may also comprise Cas proteins other than Cas9. For example, a second polypeptide of a prime editor as described herein may comprise a Cas12a (Cpf1) polypeptide or variants thereof. In some embodiments, the Cas12a polypeptide may comprise a mutation that reduces or abolishes the endonuclease domain of the Cas12a polypeptide. For example, the Cas12a polypeptide may be a Cas12a nickase. In some instances, the Cas protein comprises an amino acid sequence that is at least 85%, at least 90%, at least 91%, at least 92%, at least 93%, at least 94%, at least 95%, at least 96%, at least 97%, at least 98%, at least 99%, or at least 99.5% identical to a naturally occurring Cas12a polypeptide.

[0277] In some embodiments, the DNA binding domain of a prime editor may be a Cas protein that comprises a Cas12b (C2c1) or a Cas12c (C2c3) polypeptide. In some instances, the Cas protein comprises an amino acid sequence that is at least 85%, at least 90%, at least 91%, at least 92%, at least 93%, at least 94%, at least 95%, at least 96%, at least 97%, at least 98%, at least 99%, or at least 99.5% identical to a naturally-occurring Cas12b (C2c1) or Cas12c (C2c3) protein. In some instances, the Cas protein is a Cas12b nickase or a Cas12c nickase. In some instances, the Cas protein is a Cas12e, a Cas12d, a Cas13, or a Cas (1) polypeptide. In some instances, the Cas protein comprises an amino acid sequence that is at least 85%, at least 90%, at least 91%, at least 92%, at least 93%, at least 94%, at least 95%, at least 96%, at least 97%, at least 98%, at least 99%, or at least 99.5% identical to a naturally-occurring Cas12e, Cas12d, Cas13, or Cas Φprotein. In some instances, the Cas protein is a Cas12e, Cas12d, Cas13, or Cas Φnickase.

### Prime Editor Linker

[0278] In some embodiments, polypeptide domains of a prime editor may be fused or linked by a linker, e.g., a peptide linker to form a fusion protein. In other embodiments, a prime editor comprises one or more polypeptide domains provided in trans as separate proteins, which are capable of being associated to each other through non-peptide linkages or through aptamers or recruitment sequences. For example, a prime editor may comprise a DNA binding domain and a DNA polymerase domain (e.g., a reverse transcriptase domain) associated with each other by an RNA-protein recruitment aptamer, e.g., a MS2 aptamer, which may be linked to a PEgRNA. Prime editor polypeptide components may be encoded by one or more polynucleotides in whole or in part. In some embodiments, a single polynucleotide, construct, or vector encodes the prime editor fusion protein. In some embodiments, multiple polynucleotides, constructs, or vectors each encode a polypeptide domain or portion of a domain of a prime editor, or a portion of a prime editor fusion protein. For example, a prime editor fusion protein may comprise an N-terminal portion fused to an intein-N and a C-terminal portion fused to an intein-C, each of which is individually encoded by an AAV vector.

[0279] Linkers

[0280] Polypeptides comprising components of a prime editor may be fused via linkers, e.g., peptide linkers. In some embodiments, the linker region can be truncated and/or modified. In some embodiments, a prime editor may comprise a linker as described in Table 11. In some embodiments, a linker may comprise a sequence that is at least about 50%, 60%, 70%, 80%, 90%, 95%, 99%, identical to a sequence set forth in SEQ ID NOs: 273-318. In some embodiments, a linker may comprise a sequence set forth in any ne of SEQ ID NOs: 272-318. In some embodiments, polypeptides comprising components of a prime editor may be provided in trans relevant to each other. For example, a reverse transcriptase domain provided herein may be expressed, delivered, or otherwise provided as an individual component rather than as a part of a fusion protein with the DNA binding domain. In such cases, components of the prime editor may be associated through non-peptide linkages or co-localization functions. In some embodiments, a prime editor further comprises additional components capable of interacting with, associating with, or capable of recruiting other components of the prime editor or the prime editing system. For example, a prime editor may comprise an RNA-protein recruitment polypeptide that can associate with an RNA-protein recruitment RNA aptamer. In some embodiments, an RNA-protein recruitment polypeptide can recruit, or be recruited by, a specific RNA sequence. Non limiting examples of RNA-protein recruitment polypeptide and RNA aptamer pairs include a MS2 coat protein and a MS2 RNA hairpin, a PCP polypeptide and a PP7 RNA hairpin, a Com polypeptide and a Com RNA hairpin, a Ku protein and a telomerase Ku binding RNA motif, and a Sm7 protein and a telomerase Sm7 binding RNA motif. In some embodiments, the prime editor comprises a DNA binding domain fused or linked to an RNA-protein recruitment polypeptide. In some embodiments, the prime editor comprises a DNA polymerase domain fused or linked to an RNA-protein recruitment polypeptide. In some embodiments, the DNA binding domain and the DNA polymerase domain fused to the RNA-protein recruitment polypeptide, or the DNA binding domain fused to the RNA-protein recruitment polypeptide and the DNA polymerase domain are co-localized by the corresponding RNA-protein recruitment RNA aptamer of the RNA-protein recruitment polypeptide. In some embodiments, the corresponding RNA-protein recruitment RNA aptamer fused or linked to a portion of the PEgRNA or ngRNA. For example, an MS2 coat protein fused or linked to the DNA polymerase and a MS2 hairpin installed on the PEgRNA for co-localization of the DNA polymerase and the RNA-guided DNA binding domain. In some embodiments, a DNA binding domain of a prime editor may be located C-terminal to the DNA polymerase domain. In some embodiments, a DNA binding domain of a prime editor may be located N-terminal to the DNA polymerase domain

[0281] In some embodiments, a prime editor comprises a polypeptide domain, an MS2 coat protein (MCP), that recognizes an MS2 hairpin. In some embodiments, the nucleotide sequence of the MS2 hairpin (or equivalently referred to as the “MS2 aptamer”) is: GCCAACATGAGGATCACCCATGTCTGCAGGGCC (SEQ ID NO: 911). In some embodiments, the amino acid sequence of the MCP is:

(SEQ ID NO: 912)
GSASNFTQFVLVDNGGTGDVTVAPSNFANGVAEWISSNSRSQAYKVTCS
VRQSSAQNRKYTIKVEVPKVATQTVGGEELPVAGWRSYLNMELTIPIFA
TNSDCELIVKAMQGLLKDGNPIPSAIAANSGIY.

[0282] In certain embodiments, components of a prime editor are directly fused to each other. In certain embodiments, components of a prime editor are associated to each other via a linker.

[0283] As used herein, a linker can be any chemical group or a molecule linking two molecules or moieties, e.g., a DNA binding domain and a polymerase domain of a prime editor. In some embodiments, a linker is an organic molecule, group, polymer, or chemical moiety. In some embodiments, the linker comprises a non-peptide moiety. The linker may be as simple as a covalent bond, or it may be a polymeric linker many atoms in length, for example, a polynucleotide sequence. In certain embodiments, the linker is a covalent bond (e.g., a carbon-carbon bond, disulfide bond, carbon-heteroatom bond, etc.).

[0284] In certain aspects, the prime editors provided herein comprise a linker between the Cas protein domain and the prime editing domain (e.g., reverse transcriptase domain). The linker may affect the editing efficiency by the prime editor as well as the stability and half-life of the prime editor.

[0285] As described herein, the linker may be between 10 and 200 amino acids in length, between 15 and 155 amino acids in length, or at least 30 and 300 amino acids in length. The linker may be at least 10 amino acids in length, at least 20 amino acids in length, at least 30 amino acids in length, at least 40 amino acids in length, or at least 50 amino acids in length. In some embodiments, the linker is about 15 amino acids in length. In some embodiments, the linker is about 25 amino acids in length. In some embodiments, the linker is about 50 amino acids in length. In some embodiments, the linker is about 100 amino acids in length. In some embodiments, the linker is about 155 amino acids in length.

[0286] It should be appreciated that the linker of this disclosure may be an unstructured linker, a structured linker, or a natural linker. As used herein, a “natural linker” is a linker that has evolved by nature to maintain activity between protein domains (e.g., between Cas protein domain and reverse transcriptase domain). In some embodiments, the natural linker comprises at least 1 domain, at least 2 domains, at least 3 domains, at least 4 domains, at least 5 domains, at least 6 domains, at least 7 domains, at least 8 domains, at least 9 domains, or at least 10 domains. An exemplary natural linker is shown in FIG. 6.

[0287] As use herein, a “structured linker” is a linker that maintains structural integrity and increases stability of protein domains (e.g., between Cas protein domain and reverse transcriptase domain). In some embodiments, the structured linker comprises a fixed distance between protein domains (e.g., 1 domain, 2 domains, 3 domains, 4 domains, 5 domains, 6 domains, 7 domains, 8 domains, 9 domains, or 10 domains). In some embodiments, the fixed distance is at least 1 nucleotide, at least 2 nucleotides, at least 3 nucleotides, at least 4 nucleotides, at least 5 nucleotides, at least 6 nucleotides, at least 7 nucleotides, at least 8 nucleotides, at least 9 nucleotides, or at least 10 nucleotides. An exemplary structured linker is shown in FIG. 6.

[0288] As used herein, an “unstructured linker” is a linker that is structurally flexible and allows access to productive conformations of protein domains (e.g., between Cas protein domain and reverse transcriptase domain). In some embodiments, the unstructured linker comprises at least 1 domain, at least 2 domains, at least 3 domains, at least 4 domains, at least 5 domains, at least 6 domains, at least 7 domains, at least 8 domains, at least 9 domains, or at least 10 domains. An exemplary unstructured linker is shown in FIG. 6.

[0289] The linker of the disclosure may comprise a PE2 linker, a GS11 linker, a ALEA linker, a GSS linker, a NAT17 linker, a NAT 23 linker, or a GS8 linker.

[0290] In some embodiments, the linker is at least 85%, at least 86%, at least 87%, at least 88%, at least 89%, at least 90%, at least 91%, at least 92%, at least 93%, at least 94%, at least 95%, at least 96%, at least 97%, at least 98%, at least 99% identical to a sequence provided in Table 11. In some embodiments, the linker comprises an amino acid sequence selected from SEQ ID NO: 272-318 (Table 11). Exemplary linkers are shown in Table 11.

[0291] In some embodiments, a prime editing complex comprising a prime editor linker disclosed herein has at least 0.5, at least 1, at least 1.1, at least 1.2, at least 1.25, at least 1.3, at least 1.4, at least 1.5, at least 1.6, at least 1.7 at least 1.8, at least 1.9, or at least 2.0 fold average increase in editing efficiency over a PE2 system.

[0292] A person of skill in the art would appreciate that the present disclosure is not limited by the sequences in Tables 11 and structures in FIG. 6 as the configurations in Tables 11 and FIG. 4 are examples of a broader class of linkers included in the present disclosure.

[0293] In certain embodiments, two or more components of a prime editor are linked to each other by a peptide linker. In some embodiments, a peptide linker is 5-100 amino acids in length, for example, 2, 3, 4, 5, 6, 7, 8, 9, 10, 11, 12, 13, 14, 15, 16, 17, 18, 19, 20, 21, 22, 23, 24, 25, 26, 27, 28, 29, 30, 30-35, 35-40, 40-45, 45-50, 50-60, 60-70, 70-80, 80-90, 90-100, 100-150, or 150-200 amino acids in length. In some embodiments, the peptide linker is 16 amino acids in length, 24 amino acids in length, 64 amino acids in length, or 96 amino acids in length.

[0294] A linker may be flexible, rigid, and/or cleavable. In some embodiments, the linker is a flexible linker. In some embodiments, the linker comprises the amino acid sequence (GGGGS)n (SEQ ID NO: 913), (G)n (SEQ ID NO: 914), (EAAAK)n (SEQ ID NO: 915), (GGS)n (SEQ ID NO: 916), (SGGS)n (SEQ ID NO: 917), (XP)n (SEQ ID NO: 918), or any combination thereof, wherein n is independently an integer between 1 and 30, and wherein X is any amino acid. In some embodiments, the linker comprises the amino acid sequence (GGS)n, wherein n is 1, 3, or 7(SEQ ID NO: 919). In some embodiments, the linker comprises the amino acid sequence SGSETPGTSESATPES (SEQ ID NO: 920). In some embodiments, the linker comprises the amino acid sequence SGGSSGGSSGS ETPGTSESATPESSGGSSGGS (SEQ ID NO: 921). In some embodiments, the linker comprises the amino acid sequence SGGSGGSGGS (SEQ ID NO: 922). In some embodiments, the linker comprises the amino acid sequence SGGS (SEQ ID NO: 923). In other embodiments, the linker comprises the amino acid sequence

(SEQ ID NO: 924)
SGGSSGGSSGSETPGTSESATPESAGSYPYDVPDYAGSAAPAAKKKKLD
GSGSGGSSGGS.

[0295] In some embodiments, a linker comprises 1-100 amino acids. In some embodiments, the linker comprises the amino acid sequence SGSETPGTSESATPES (SEQ ID NO: 920). In some embodiments, the linker comprises the amino acid sequence SGGSSGGSSGSETPGTSESATPESSGGSSGGS (SEQ ID NO: 921). In some embodiments, the linker comprises the amino acid sequence SGGSGGSGGS (SEQ ID NO: 922). In some embodiments, the linker comprises the amino acid sequence SGGS (SEQ ID NO: 923). In some embodiments, the linker comprises the amino acid sequence GGSGGS (SEQ ID NO: 925), GGSGGSGGS (SEQ ID NO: 926), or SGGSSGGSSGSETPGTSESATPESAGSYPYDVPDYAGSAAPAAKKKKLDGSGSGGSSGGS (SEQ ID NO: 924), or SGGSSGGSSGSETPGTSESATPESSGGSSGGSS (SEQ ID NO: 316).

[0296] In some embodiments the amino acid linkers are homologous to the endogenous amino acids that exist between such domains in a native polypeptide. In some embodiments the endogenous amino acids that exist between such domains are substituted but the length is unchanged from the natural length.

[0297] In certain embodiments, two or more components of a prime editor are linked to each other by a non-peptide linker. In some embodiments, the linker is a carbon-nitrogen bond of an amide linkage. In certain embodiments, the linker is a cyclic or acyclic, substituted or unsubstituted, branched or unbranched aliphatic or heteroaliphatic linker. In certain embodiments, the linker is polymeric (e.g., polyethylene, polyethylene glycol, polyamide, polyester, etc.). In certain embodiments, the linker comprises a monomer, dimer, or polymer of aminoalkanoic acid. In certain embodiments, the linker comprises an aminoalkanoic acid (e.g., glycine, ethanoic acid, alanine, beta-alanine, 3-aminopropanoic acid, 4-aminobutanoic acid, 5-pentanoic acid, etc.). In certain embodiments, the linker comprises a monomer, dimer, or polymer of aminohexanoic acid (Ahx). In certain embodiments, the linker is based on a carbocyclic moiety (e.g., cyclopentane, cyclohexane). In other embodiments, the linker comprises a polyethylene glycol moiety (PEG). In certain embodiments, the linker comprises an aryl or heteroaryl moiety. In certain embodiments, the linker is based on a phenyl ring. The linker may include functionalized moieties to facilitate attachment of a nucleophile (e.g., thiol, amino) from the peptide to the linker. Any electrophile may be used as part of the linker. Exemplary electrophiles include, but are not limited to, activated esters, activated amides, Michael acceptors, alkyl halides, aryl halides, acyl halides, and isothiocyanates.

[0298] Components of a prime editor may be connected to each other in any order. In some embodiments, the DNA binding domain and the DNA polymerase domain of a prime editor may be fused to form a fusion protein or may be joined by a peptide or protein linker, in any order from the N terminus to the C terminus. In some embodiments, a prime editor comprises a DNA binding domain fused or linked to the C-terminal end of a DNA polymerase domain. In some embodiments, a prime editor comprises a DNA binding domain fused or linked to the N-terminal end of a DNA polymerase domain. In some embodiments, the prime editor comprises a fusion protein comprising the structure NH2-[DNA binding domain]-[polymerase]-COOH; or NH2-[polymerase]-[DNA binding domain]-COOH, wherein each instance of “]-[” indicates the presence of an optional linker sequence. In some embodiments, a prime editor comprises a fusion protein and a DNA polymerase domain provided in trans, wherein the fusion protein comprises the structure NH2-[DNA binding domain]-[RNA-protein recruitment polypeptide]-COOH. In some embodiments, a prime editor comprises a fusion protein and a DNA binding domain provided in trans, wherein the fusion protein comprises the structure NH2-[DNA polymerase domain]—[RNA-protein recruitment polypeptide]-COOH.

[0299] In some embodiments, a prime editor fusion protein, a polypeptide component of a prime editor, or a polynucleotide encoding the prime editor fusion protein or polypeptide component, may be split into an N-terminal half and a C-terminal half or polypeptides that encode the N-terminal half and the C terminal half, and provided to a target DNA in a cell separately. For example, in certain embodiments, a prime editor fusion protein may be split into a N-terminal and a C-terminal half for separate delivery in AAV vectors, and subsequently translated and colocalized in a target cell to reform the complete polypeptide or prime editor protein. In such cases, separate halves of a protein or a fusion protein may each comprise a split-intein to facilitate colocalization and reformation of the complete protein or fusion protein by the mechanism of intein facilitated trans splicing. In some embodiments, a prime editor comprises a N-terminal half fused to an intein-N, and a C-terminal half fused to an intein-C, or polynucleotides or vectors (e.g., AAV vectors) encoding each thereof. When delivered and/or expressed in a target cell, the intein-N and the intein-C can be excised via protein trans-splicing, resulting in a complete prime editor fusion protein in the target cell.

[0300] In some embodiments, a prime editor fusion protein is PE1. In some embodiments, a prime editor fusion protein comprises one or more individual components of PE1, as disclosed in WO/2020/191234, which is hereby incorporated by reference. In some embodiments, a PE1 prime editor fusion protein comprises a RT domain having an amino acid sequence as set forth in SEQ ID NO: 855. In some embodiments, a PE1 prime editor fusion protein comprises a RT domain having an amino acid sequence as set forth in SEQ ID NO: 857. In some embodiments, a prime editor fusion protein is PE2, as disclosed in WO/2020/191234. In some embodiments, a prime editor fusion protein comprises one or more individual components of PE2. The amino acid sequence of an exemplary PE2 and its individual components in shown in Table 15 and 16.

[0301] In various embodiments, a prime editor fusion protein comprises an amino acid sequence that is at least about 70% identical, at least about 80% identical, at least about 90% identical, at least about 95% identical, at least about 96% identical, at least about 97% identical, at least about 98% identical, at least about 99% identical, at least about 99.5% identical, or at least about 99.9% identical to PE1, PE2, or any of the prime editor fusion sequences described herein or known in the art.

[0302] Nuclear Localization Sequences

[0303] In some embodiments, a prime editor further comprises one or more nuclear localization sequence (NLS). In some embodiments, the NLS helps promote translocation of a protein into the cell nucleus. In some embodiments, a prime editor comprises a fusion protein, e.g., a fusion protein comprising a DNA binding domain and a DNA polymerase, that comprises one or more NLSs. In some embodiments, one or more polypeptides of the prime editor are fused to or linked to one or more NLSs. In some embodiments, the prime editor comprises a DNA binding domain and a DNA polymerase domain that are provided in trans, wherein the DNA binding domain and/or the DNA polymerase domain is fused or linked to one or more NLSs.

[0304] In some embodiments, a NLS may be linked or fused to the C-terminus of a DNA binding domain. In some embodiments, a NLS may be linked or fused to the N-terminus of a DNA binding domain. In some embodiments, a NLS may be linked or fused to the C-terminus of a DNA polymerase domain. In some embodiments, a NLS may be linked or fused to the N-terminus of a DNA polymerase domain. In some embodiments, a first NLS may be linked or fused to the C-terminus of a DNA binding domain and a second NLS may be linked or fused to the N-terminus of a DNA binding domain. In some embodiments, a NLS may be linked or fused to the N-terminus of a DNA polymerase domain. In some embodiments, a first NLS may be linked or fused to the C-terminus of a DNA polymerase domain and a second NLS may be linked or fused to the N-terminus of a DNA polymerase domain. In some embodiments, a first NLS may be linked or fused to the C-terminus of a DNA binding domain and a second NLS may be linked or fused to the N-terminus of a DNA polymerase domain. In some embodiments, a first NLS may be linked or fused to the C-terminus of a DNA polymerase domain and a second NLS may be linked or fused to the N-terminus of a DNA binding domain. In some embodiments, the first and the second NLs are identical. In some embodiments, the first and the second NLS are different.

[0305] In certain embodiments, a prime editor or prime editing complex comprises at least one NLS. In some embodiments, a prime editor or prime editing complex comprises at least two NLSs. In embodiments with at least two NLSs, the NLSs can be the same NLS, or they can be different NLSs.

[0306] In some instances, a prime editor may further comprise at least one nuclear localization sequence (NLS). In some cases, a prime editor may further comprise 1 NLS. In some cases, a prime editor may further comprise 2 NLSs. In other cases, a prime editor may further comprise 3 NLSs. In one case, a primer editor may further comprise more than 4, 5, 6, 7, 8, 9 or 10 NLSs.

[0307] In addition, the NLSs may be expressed as part of a prime editor complex. In some embodiments, a NLS can be positioned almost anywhere in a protein's amino acid sequence, and generally comprises a short sequence of three or more or four or more amino acids. The location of the NLS fusion can be at the N-terminus, the C-terminus, or positioned anywhere within a sequence of a prime editor or a component thereof (e.g., inserted between the DNA-binding domain and the DNA polymerase domain of a prime editor fusion protein, between the DNA binding domain and a linker sequence, between a DNA polymerase and a linker sequence, between two linker sequences of a prime editor fusion protein or a component thereof, in either N-terminus to C-terminus or C-terminus to N-terminus order). In some embodiments, a prime editor is fusion protein that comprises an NLS at the N terminus. In some embodiments, a prime editor is fusion protein that comprises an NLS at the C terminus. In some embodiments, a prime editor is fusion protein that comprises at least one NLS at both the N terminus and the C terminus. In some embodiments, the prime editor is a fusion protein that comprises two NLSs at the N terminus and/or the C terminus.

[0308] Any NLSs that are known in the art are also contemplated herein. The NLSs may be any naturally occurring NLS, or any non-naturally occurring NLS (e.g., an NLS with one or more mutations relative to a wild-type NLS). In some embodiments, the one or more NLSs of a prime editor comprise bipartite NLSs. In some embodiments, a nuclear localization signal (NLS) is predominantly basic. In some embodiments, the one or more NLSs of a prime editor are rich in lysine and arginine residues. In some embodiments, the one or more NLSs of a prime editor comprise proline residues. In some embodiments, a prime editor comprises an amino acid sequence comprising a nuclear localization signal (NLS) having the sequence

(SEQ ID NO: 524)
MDSLLMNRRKFLYQFKNVRWAKGRRETYLC,
(SEQ ID NO: 927)
KRTADGSEFESPKKKRKV,
(SEQ ID NO: 928)
KRTADGSEFEPKKKRKV,
(SEQ ID NO: 929)
NLS KRPAAIKKAGQAKKKK,
(SEQ ID NO: 930)
RQRRNELKRSF,
or
(SEQ ID NO: 931)
NQSSNFGPMKGGNFGGRSSGPYGGGGQYFAKPRNQGGY.

[0309] In some embodiments, a NLS is a monopartite NLS. For example, in some embodiments, a NLS is a SV40 large T antigen NLS PKKKRKV(SEQ ID NO: 522). In some embodiments, a NLS is a bipartite NLS. In some embodiments, a bipartite NLS comprises two basic domains separated by a spacer sequence comprising a variable number of amino acids. In some embodiments, a NLS is a bipartite NLS. In some embodiments, a bipartite NLS consists of two basic domains separated by a spacer sequence comprising a variable number of amino acids. In some embodiments, the spacer amino acid sequence comprises the Xenopus nucleoplasmin sequence KRXXXXXXXXXXKKKL (SEQ ID NO: 922) wherein X is any amino acid. In some embodiments, a NLS is a noncanonical sequences such as M9 of the hnRNP A1 protein, the influenza virus nucleoprotein NLS, and the yeast Gal4 protein NLS.

[0310] Other non-limiting examples of NLS sequences are provided in Table 12 below.

### Engineered Cas-RT

[0311] In some embodiments. prime editors described herein comprise an engineered Cas-RT fusion protein or protein complexes, or a DNA binding domain (e.g., a Cas protein) -DNA polymerase (e.g., RT) fusion proteins or complexes. For example, a prime editor may comprise a fusion protein of a Cas polypeptide and a RT polypeptide, where the Cas component of a naturally occurring fusion protein of a Cas-RT and a Type III Cas protein is replaced by a heterologous DNA binding domain, e.g., a heterologous Cas polypeptide. In some embodiments, a prime editor comprises a RT domain of a naturally occurring Cas-RT fusion protein, and a DNA binding domain that is heterologous Cas polypeptide, i.e., the Cas polypeptide that is different that the one in the corresponding naturally occurring Cas-RT fusion protein. In some embodiments, a prime editor comprises a DNA binding domain and a RT domain that naturally occurs in a Type III CRISPR system Cas-RT fusion protein. In some embodiments, the Cas polypeptide in a naturally occurring Cas-RT fusion protein that is replaced by a heterologous Cas polypeptide comprises a Cas1 polypeptide, a Cas3 polypeptide, or a Cas6 polypeptide. In some embodiments, a prime editor comprises a DNA binding domain and an RT domain that naturally occurs in a Cas1-RT fusion protein (the RT also referred to as a “Cas1 RT”), and the DNA binding domain is not a Cas1 domain. In some embodiments, a prime editor comprises a DNA binding domain comprises a DNA binding domain and an RT domain that naturally occurs in a Cas6-RT fusion protein (the RT also referred to as a “Cas6 RT”), and the DNA binding domain is not a Cas6 domain. In some embodiments, a prime editor comprises a DNA binding domain comprises a DNA binding domain and an RT domain that naturally occurs in a Cas-RT fusion protein comprising Cas1 and Cas6 ((the RT also referred to as a “Cas1-Cas6 RT”), and the DNA binding domain is not a Cas1 or Cas6 domain. The naturally occurring Cas-RT fusion may have a configuration of Cas1-RT-Cas6 or Cas6-RT-Cas1, where either of the Cas1 or Cas6 may be replaced by a heterologous DNA binding domain for the purpose of a prime editor. In some embodiments, the DNA binding domain-RT fusion or complex may further be able to interact with other CRISPR Cas proteins, e.g., Cas3. As used herein, “heterologous” means a non-native gene or protein component of, e.g., an engineered complex or fusion protein that does not naturally occur in the same organism, or in a naturally occurring fusion protein or complex, as other components of the complex or fusion protein, but which is engineered into the complex or fusion protein.

[0312] The DNA binding domain that is used to replace a Cas domain in a naturally occurring Cas-RT fusion can be any DNA binding domain as described herein. In some embodiments, the DNA binding domain comprises a Cas9 polypeptide, or any functional variant or fragment as described herein. In some embodiments, the DNA binding domain comprises a Cas12a polypeptide, or any functional variant or fragment as described herein. In some embodiments, the DNA binding domain comprises a Cas12b, Cas12c, Cas12d, Cas 12e, or a Cas (1) polypeptide or any functional variant or fragment as described herein. In some embodiments, the DNA binding domain comprises nuclease activity, for example, a nickase activity.

[0313] In some embodiments, the DNA binding domain comprises a Cas9 polypeptide or a Cas9 variant as described herein, or a functional fragment thereof. In some embodiments, the DNA binding domain comprises a Cas9 nickase as disclosed herein, e.g., a H840A Cas9 nickase.

[0314] In some embodiments, a RT domain of a Cas-RT comprises an amino acid sequence that is at least about 50%, at least about 55%, at least about 60%, at least about 65%, at least about 70%, at least about 75%, at least about 80%, at least about 85%, at least about 86%, at least about 87%, at least about 88%, at least about 89%, at least about 90%, at least about 91%, at least about 92%, at least about 93%, at least about 94%, at least about 95%, at least about 96%, at least about 97%, at least about 98%, at least about 99% identical to a sequence selected from the group consisting of: SEQ ID Nos: 129-136, 345, 368, 396, or 533-846. In some embodiments, a RT domain of a Cas-RT comprises an amino acid sequence that has no more than 1, 2, 3, 4, 5, 6, 7, 8, 9, 10, 11, 12, 13, 14, 15, 16, 17, 18, 19, or 20 differences e.g., mutations e.g., deletions or substitutions compared to any of the amino acid sequences set forth in SEQ ID NO: 129-136 or 533-846. In some embodiments, the RT domain of a Cas-RT comprises an amino acid sequence selected from the group consisting of: SEQ ID Nos: 129-136, 345, 368, 396, or 533-846.

[0315] In some embodiments, a prime editor comprising a Cas9 polypeptide and an RT domain (e.g., RT domain of a naturally occurring Cas-RT) that comprises an amino acid sequence that is at least about 50%, at least about 55%, at least about 60%, at least about 65%, at least about 70%, at least about 75%, at least about 80%, at least about 85%, at least about 86%, at least about 87%, at least about 88%, at least about 89%, at least about 90%, at least about 91%, at least about 92%, at least about 93%, at least about 94%, at least about 95%, at least about 96%, at least about 97%, at least about 98%, at least about 99% identical to a sequence selected from the group consisting of: SEQ ID Nos: 129-136, 345, 368, 396, or 533-846. In some embodiments, a prime editor comprising a Cas9 polypeptide and an RT domain (e.g., RT domain of a naturally occurring Cas-RT) comprises an amino acid sequence that has no more than 1, 2, 3, 4, 5, 6, 7, 8, 9, 10, 11, 12, 13, 14, 15, 16, 17, 18, 19, or 20 differences e.g., mutations e.g., deletions or substitutions compared to any of the amino acid sequences set forth in SEQ ID NO: 129-136, 345, 368, 396, or 533-846. In some embodiments, a prime editor comprising a Cas9 polypeptide and an RT domain (e.g., RT domain of a Cas-RT) comprises an amino acid sequence selected from the group consisting of: SEQ ID Nos: 129-136, 345, 368, 396, or 533-846.

[0316] The engineered Cas-RTs described herein may comprise additional functional domains, for example, any of the SET domains as described herein. In some embodiments, an engineered Cas-RT comprises a GB1 domain, or bGB1 domain described herein. In some embodiments, the engineered Cas-RT described herein and fragments thereof may also comprise any of the SET domain, GB1 domain, or bGB1 domain described herein. The SET domain, GB1 domain, or bGB1 domain may comprise any SET domains, GB1 domains, or bGB1 domains described in this disclosure.

### Domain Structures of Prime Editors

[0317] In some embodiments, a prime editor may comprise a fusion polypeptide comprising a first polypeptide and a second polypeptide. In some embodiments, a first polypeptide of a prime editor may be located at the N-terminus or C-terminus of the second polypeptide of the primer editor. In some embodiments, the first polypeptide is located at the N-terminus of the second polypeptide. In some embodiments, the first polypeptide is located at the C-terminus of the second polypeptide.

[0318] In some embodiments, a prime editor may further comprise at least one nuclear localization sequence (NLS). In some embodiments, a prime editor may further comprise 1 NLS. In some embodiments, a prime editor may further comprise 2 NLSs. In other cases, a prime editor may further comprise 3 NLSs. In one case, a primer editor may further comprise more than 4, 5, 6, 7, 8, 9 or 10 NLSs.

[0319] In some embodiments, the domain structure of a prime editor may comprise NH2-first polypeptide-second polypeptide-COOH or NH2-second polypeptide-first polypeptide-COOH, wherein NH2 is the N-terminus of the primer editor, wherein COOH is the C-terminus of the prime editor, wherein—comprises from 0-100 amino acids. In some embodiments, the domain structure of a prime editor may comprise NH2-first polypeptide-second polypeptide-COOH. In some embodiments, the domain structure of a prime editor may comprise NH2-second polypeptide-first polypeptide-COOH.

[0320] In some instance, the domain structure of a prime editor comprising one NLS may comprise NH2-first polypeptide-second polypeptide-NLS-COOH, NH2-first polypeptide-NLS-second polypeptide-COOH, NH2-NLS-first polypeptide-second polypeptide-COOH, NH2-second polypeptide-first polypeptide-NLS—COOH, NH2-second polypeptide-NLS-first polypeptide-COOH, or NH2-NLS-second polypeptide-first polypeptide-COOH. In some embodiments, the domain structure of a prime editor comprising one NLS may comprise NH2-first polypeptide-second polypeptide-NLS—COOH. In some embodiments, the domain structure of a prime editor comprising one NLS may comprise NH2-first polypeptide-NLS-second polypeptide-COOH. In some embodiments, the domain structure of a prime editor comprising one NLS may comprise NH2-NLS-first polypeptide-second polypeptide-COOH. In some embodiments, the domain structure of a prime editor comprising one NLS may comprise NH2-second polypeptide-first polypeptide-NLS—COOH. In some embodiments, the domain structure of a prime editor comprising one NLS may comprise NH2-second polypeptide-NLS-first polypeptide-COOH. In some embodiments, the domain structure of a prime editor comprising one NLS may comprise NH2-NLS-second polypeptide-first polypeptide-COOH. In some embodiments, a prime editor comprising more than one NLS may have an NLS sequence located in the N-terminus or C-terminus of the first polypeptide or the second polypeptide. In some embodiments, an NLS sequence may be located in the N-terminus or C-terminus of another NLS.

[0321] In some embodiments, a second polypeptide may comprise a DNA-binding domain or a DNA endonuclease domain. In some embodiments, a second polypeptide may comprise a DNA-binding domain. In some embodiments, the second polypeptide of a prime editor may comprise a DNA endonuclease domain. In one case, a second polypeptide may comprise a DNA-binding domain and a DNA endonuclease domain. In some embodiments, the DNA-binding domain may comprise DNA endonuclease activity. In some embodiments, the DNA-binding domain and the DNA endonuclease domain may comprise overlapping amino acids. In some embodiments, the prime editor may comprise a DNA-binding domain and further a separate endonuclease domain. For example, the DNA-binding domain and the DNA endonuclease domain may comprise two independent amino acid sequences. In other cases, the second polypeptide of a prime editor may comprise more than one DNA-binding domain. In one case, the second polypeptide of a prime editor may comprise more than one DNA endonuclease domain.

[0322] In some embodiments, the DNA-binding domain of a prime editor may be located at the N-terminus or C-terminus of the DNA endonuclease domain of the prime editor. In some embodiments, the DNA-binding domain is located at the N-terminus of the DNA endonuclease domain of the prime editor. In some embodiments, the DNA-binding domain of a prime editor is located at the C-terminus of the DNA endonuclease domain of the prime editor. In some embodiments, the DNA-binding domain of a prime editor is located within the DNA endonuclease domain of the prime editor. In other cases, the DNA endonuclease domain of a prime editor is located within the DNA-binding domain of the prime editor. For the prime editor comprising more than one DNA-binding domain, the DNA-binding domain may also be located at the N-terminus and the C-terminus of a DNA endonuclease domain. For the prime editor comprising more than one DNA endonuclease domain, the DNA endonuclease domain may also be located at the N-terminus and the C-terminus of a DNA-binding domain. In some embodiments, a prime editor may comprise the combinations of the arrangements of the DNA-binding domain and the DNA endonuclease domain described in this disclosure.

[0323] Flap Endonuclease

[0324] In some embodiments, a prime editor further comprises additional polypeptide components, for example, a flap endonuclease (FEN, e.g., FEN1). In some embodiments, the flap endonuclease excises the 5′ single stranded DNA of the edit strand of the target gene and assists incorporation of the intended nucleotide edit into the target gene. In some embodiments, the FEN is linked or fused to another component. In some embodiments, the FEN is provided in trans, for example, as a separate polypeptide or polynucleotide encoding the FEN.

[0325] In some embodiments, a prime editor or prime editing composition comprises a flap nuclease. In some embodiments, the flap nuclease is a FEN1, or any FEN1 functional variant, functional mutant, or functional fragment thereof. In some embodiments, the flap nuclease is a TREX2, EXO1, or any other flap nuclease known in the art, or any functional variant, functional mutant, or functional fragment thereof. In some embodiments, the flap nuclease has amino acid sequence that is at least about 70% identical, at least about 80% identical, at least about 90% identical, at least about 95% identical, at least about 96% identical, at least about 97% identical, at least about 98% identical, at least about 99% identical, at least about 99.5% identical, or at least about 99.9% identical to any of the flap nucleases described herein or known in the art.

### Additional Prime Editor Components

[0326] A prime editor described herein may comprise additional functional domains, for example, one or more domains that modify the folding, solubility, or charge of the prime editor. In some instances, the prime editor may comprise a solubility-enhancement (SET) domain.

[0327] In some embodiments, a split intein comprises two halves of an intein protein, which may be referred to as a N-terminal half of an intein, or intein-N, and a C-terminal half of an intein, or intein-C, respectively. In some embodiments, the intein-N and the intein-C may each be fused to a protein domain (the N-terminal and the C-terminal exteins). The exteins can be any protein or polypeptides, for example, any prime editor polypeptide component. In some embodiments, the intein-N and intein-C of a split intein can associate non-covalently to form an active intein and catalyze a- trans splicing reaction. In some embodiments, the trans splicing reaction excises the two intein sequences and links the two extein sequences with a peptide bond. As a result, the intein-N and the intein-C are spliced out, and a protein domain linked to the intein-N is fused to a protein domain linked to the intein-C, essentially in same way as a contiguous intein does. In some embodiments, a split-intein is derived from a eukaryotic intein, a bacterial intein, or an archaeal intein. Preferably, the split intein so derived will possess only the amino acid sequences essential for catalyzing trans-splicing reactions. In some embodiments, an intein-N or an intein-C further comprise one or more amino acid substitutions as compared to a wild type intein-N or wild type intein-C, for example, amino acid substitutions that enhances the trans-splicing activity of the split intein. In some embodiments, the intein-C comprises 4 to 7 contiguous amino acid residues, wherein at least 4 amino acids of which are from the last β-strand of the intein from which it was derived. In some embodiments, the split intein is derived from a Ssp DnaE intein, e.g., Synechocytis sp. PCC6803, or any intein or split intein known in the art, or any functional variants or fragments thereof.

[0328] In some embodiments, a prime editor comprises one or more epitope tags. Non-limiting examples of epitope tags include histidine (His) tags, V5 tags, FLAG tags, influenza hemagglutinin (HA) tags, Myc tags, VSV-G tags, thioredoxin (Trx) tags, biotin carboxylase carrier protein (BCCP) tags, myc-tags, calmodulin-tags, polyhistidine tags, also referred to as histidine tags or His-tags, maltose binding protein (MBP)-tags, nus-tags, glutathione-S-transferase (GST)-tags, green fluorescent protein (GFP)-tags, thioredoxin-tags, S-tags, Softags (e.g., Softag 1, Softag 3), strep-tags, biotin ligase tags, FlAsH tags, V5 tags, and SBP-tags. Additional suitable sequences will be apparent to those of skill in the art. In some embodiments, the fusion protein comprises one or more His tags.

[0329] In some embodiments, a prime editor comprises one or more polypeptide domains encoded by one or more reporter genes. Examples of reporter genes include, but are not limited to, glutathione-5-transferase (GST), horseradish peroxidase (HRP), chloramphenicol acetyltransferase (CAT), beta-galactosidase, beta-glucuronidase, luciferase, green fluorescent protein (GFP), HcRed, DsRed, cyan fluorescent protein (CFP), yellow fluorescent protein (YFP), and autofluorescent proteins including blue fluorescent protein (BFP).

[0330] In some embodiments, a prime editor comprises one or more polypeptide domains that binds DNA molecules or binds other cellular molecules. Examples of binding proteins or domains include, but are not limited to, maltose binding protein (MBP), S-tag, Lex A DNA binding domain (DBD) fusions, GAL4 DNA binding domain fusions, and herpes simplex virus (HSV) BP16 protein fusions.

[0331] In some embodiments, a prime editor comprises a protein domain that is capable of modifying the intracellular half-life of the prime editor.

[0332] Components of a prime editors may be arranged in a modular fashion to target, edit, or modify a target DNA sequence, e.g., to install a desired nucleotide edit into a target cell genome, by reverse transcription. In some embodiments, the components of a prime editor may comprise an unrelated DNA binding domain, and a DNA polymerase domain, e.g., reverse transcriptase domain. In some embodiments, the DNA binding domain and the DNA polymerase domain can be interchangeably located in the 5′ portion of the prime editor or the 3′ portion of the prime editor. In some embodiments, multiple functional domains may arise from a single protein. In some embodiments, all functional domains may arise from different proteins. In some embodiments, a DNA binding domain of a prime editor may be located C-terminal to the DNA polymerase domain. In some embodiments, a DNA binding domain of a prime editor may be located N-terminal to the DNA polymerase domain.

[0333] In some embodiments, a prime editor may comprise a DNA polymerase domain having an amino acid sequence that is selected from any of the amino acid sequence selected from SEQ ID NOs: 1-95, 138-146, 198-271, 319-493, 855-857, 884, or 990-1006, a DNA binding domain having an amino acid sequence that is selected from any of the amino acid sequence selected from SEQ ID NOs: 138-146, 494, 858, 1100, 495-503, and optionally a linker having an amino acid sequence that is selected from any of the amino acid sequence selected from SEQ ID NOs: 272-318. In some embodiments, a prime editor further comprises one or more nuclear localization sequence (NLS) having an amino acid sequence that is selected from any of the amino acid sequence selected from SEQ ID NOs: 522-532 or described herein. In some embodiments, the NLS is fused to the N-terminus of a DNA polymerase domain described herein. In some embodiments, the NLS is fused to the C-terminus of the DNA polymerase domain. In some embodiments, the NLS is fused to the N-terminus or the C-terminus of a DNA binding domain. In some embodiments, a linker sequence is disposed between the NLS and a domain of the prime editor.

PE gRNAs

[0334] The term “prime editing guide RNA”, or “PEgRNA”, refers to a guide polynucleotide that comprises one or more intended nucleotide edits for incorporation into the target DNA. In some embodiments, the PEgRNA associates with and directs a prime editor to incorporate the one or more intended nucleotide edits into the target gene via prime editing. “Nucleotide edit” or “intended nucleotide edit” refers to a specified deletion of one or more nucleotides at one specific position, insertion of one or more nucleotides at one specific position, substitution of a single nucleotide, or other alterations at one specific position to be incorporated into the sequence of the target gene. Intended nucleotide edit may refer to the edit on the editing template as compared to the sequence on the target strand of the target gene or may refer to the edit encoded by the editing template on the newly synthesized single stranded DNA that replaces the editing target sequence, as compared to the editing target sequence.

[0335] In some embodiments, a PEgRNA comprises at least one of: a spacer, an extension arm, and a gRNA core. In some embodiments, a PEgRNA comprises a spacer sequence that is complementary or substantially complementary to a search target sequence on a target strand of the target gene. In some embodiments, the PEgRNA comprises a gRNA core that associates with a DNA binding domain, e.g., a CRISPR-Cas protein domain, of a prime editor. In some embodiments, the PEgRNA further comprises an extended nucleotide sequence comprising one or more intended nucleotide edits compared to the endogenous sequence of the target gene, wherein the extended nucleotide sequence can be referred to as an extension arm.

[0336] In certain embodiments, the extension arm comprises a primer binding site sequence (PBS) that can initiate target-primed DNA synthesis. In some embodiments, the PBS is complementary or substantially complementary to a free 3′ end on the edit strand of the target gene at a nick site generated by the prime editor. In some embodiments, the extension arm further comprises an editing template that comprises one or more intended nucleotide edits to be incorporated in the target gene by prime editing. In some embodiments, the editing template is a template for an RNA-dependent DNA polymerase domain or polypeptide of the prime editor, for example, a reverse transcriptase iii domain. The reverse transcriptase editing template may also be referred to herein as an RT template, or RTT. In some embodiments, the editing template comprises partial complementarity to an editing target sequence in the target gene. In some embodiments, the editing template comprises substantial or partial complementarity to the editing target sequence except at the position of the intended nucleotide edits to be incorporated into the target gene.

[0337] In some embodiments, a PEgRNA includes only RNA nucleotides and forms an RNA polynucleotide. In some embodiments, a PEgRNA is a chimeric polynucleotide that includes both RNA and DNA nucleotides. For example, a PEgRNA can include DNA in the spacer sequence, the gRNA core, or the extension arm. In some embodiments, a PEgRNA comprises DNA in the spacer sequence. In some embodiments, the entire spacer sequence of a PEgRNA is a DNA sequence. In some embodiments, the PEgRNA comprises DNA in the gRNA core, for example, in a stem region of the gRNA core. In some embodiments, the PEgRNA comprises DNA in the extension arm, for example, in the editing template. An editing template that comprises a DNA sequence may serve as a DNA synthesis template for a DNA polymerase in a prime editor, for example, a DNA-dependent DNA polymerase. Accordingly, the PEgRNA may be a chimeric polynucleotide that comprises RNA in the spacer, gRNA core, and/or the PBS sequences and DNA in the editing template.

[0338] In some embodiments, a spacer may comprise a sequence that hybridizes to a first strand of a double stranded target DNA sequence. For example, the spacer may comprise complementary sequence to a protospacer sequence in the first strand of the double stranded DNA sequence. In some cases, an extension arm may comprise a sequence that hybridizes to a second strand (i.e., the complementary strand of the first strand) of the double stranded target DNA sequence. In some embodiments, a gRNA core may comprise a sequence that interacts with the second polypeptide. In some instances, a nucleotide of a PEgRNA may be part of a spacer. In some cases, a nucleotide of a PEgRNA may be part of an extension arm. In some cases, a nucleotide of a PEgRNA may be part of a gRNA core. In some embodiments, a nucleotide of a PEgRNA may be part of a spacer and an extension arm. In some embodiments, a nucleotide of a PEgRNA may be part of a spacer and a gRNA core. In some embodiments, a nucleotide of a PEgRNA may be part of an extension arm and a gRNA core. In some embodiments, a nucleotide of a PEgRNA may be part of a spacer and an extension arm. In some embodiments, a nucleotide of a PEgRNA may not be part of a spacer, an extension arm, or a gRNA core.

[0339] Components of a PEgRNA may be arranged in a modular fashion. In some embodiments, the spacer and the extension arm comprising a primer binding site sequence (PBS) and an editing template, e.g., a reverse transcriptase template (RTT), can be interchangeably located in the 5′ portion of the PEgRNA, the 3′ portion of the PEgRNA, or in the middle of the gRNA core. In some embodiments, a PEgRNA comprises a PBS and an editing template sequence in 5′ to 3′ order. In some embodiments, the gRNA core of a PEgRNA of this disclosure may be located in between a spacer and an extension arm of the PEgRNA. In some embodiments, the gRNA core of a PEgRNA may be located at the 3′ end of a spacer. In some embodiments, the gRNA core of a PEgRNA may be located at the 5′ end of a spacer. In some embodiments, the gRNA core of a PEgRNA may be located at the 3′ end of an extension arm. In some embodiments, the gRNA core of a PEgRNA may be located at the 5′ end of an extension arm. In some embodiments, the PEgRNA comprises, from 5′ to 3′: a spacer, a gRNA core, and an extension arm. In some embodiments, the PEgRNA comprises, from 5′ to 3′: a spacer, a gRNA core, an editing template, and a PBS. In some embodiments, the PEgRNA comprises, from 5′ to 3′: an extension arm, a spacer, and a gRNA core. In some embodiments, the PEgRNA comprises, from 5′ to 3′: an editing target, a PBS, a spacer, and a gRNA core.

[0340] Provided herein in some embodiments are example sequences for PEgRNAs, including PEgRNA spacers, PBS, RTT, and ngRNA spacers for a prime editing system comprising a nuclease that recognizes the PAM sequence “NG.” In some embodiments, a PAM motif on the edit strand comprises an “NG” motif, wherein N is any nucleotide. In some embodiments, a PEgRNA of this disclosure is part of a prime editing system that recognizes the PAM motif GG and comprises a spacer in, a PBS sequence, and an RTT sequence. In some embodiments, a PEgRNA of this disclosure is part of a prime editing system that recognizes the PAM motif TG. In some embodiments, a PEgRNA of this disclosure is part of a prime editing system that recognizes the PAM motif CG. In some embodiments, a PEgRNA of this disclosure is part of a prime editing system that recognizes the PAM motif AG.

[0341] Provided herein in some embodiments are example sequences for PEgRNA spacers, PBS, RTT, and ngRNA spacers for a prime editing system comprising a nuclease that recognizes the PAM sequence “NAG.” In some embodiments, a PAM motif on the edit strand comprises an “NAG” motif, wherein N is any nucleotide.

[0342] In some embodiments, a PEgRNA of this disclosure is part of a prime editing system that recognizes the PAM motif GAG. In some embodiments, a PEgRNA of this disclosure is part of a prime editing system that recognizes the PAM motif CAG.

[0343] Provided herein in some embodiments are example sequences for PEgRNA spacers, PBS, RTT, and ngRNA spacers for a prime editing system comprising a nuclease that recognizes the PAM sequence “NGA.” In some embodiments, a PAM motif on the edit strand comprises an “NGA” motif, wherein N is any nucleotide. In some embodiments, a PEgRNA of this disclosure is part of a prime editing system that recognizes the PAM motif GGA. In some embodiments, a PEgRNA of this disclosure is part of a prime editing system that recognizes the PAM motif TGA.

[0344] Provided herein in some embodiments are example sequences for PEgRNA spacers, PBS, RTT, and ngRNA spacers for a prime editing system comprising a nuclease that recognizes the PAM sequence “NGG.” In some embodiments, a PAM motif on the edit strand comprises an “NGG” motif, wherein N is any nucleotide. In some embodiments, a PEgRNA of this disclosure is part of a prime editing system that recognizes the PAM motif CGG. In some embodiments, a PEgRNA of this disclosure is part of a prime editing system that recognizes the PAM motif AGG.

[0345] Provided herein in some embodiments are example sequences for PEgRNA spacers, PBS, RTT, and ngRNA spacers for a prime editor complex comprising a nuclease that recognizes the PAM sequence “NNGG.” In some embodiments, a PAM motif on the edit strand comprises an “NNGG” motif, wherein N is any nucleotide. In some embodiments, a PEgRNA of this disclosure is part of a prime editing system that recognizes the PAM motif GCGG. In some embodiments, a PEgRNA of this disclosure is part of a prime editing system that recognizes the PAM motif GAGG.

[0346] Provided herein in some embodiments are example sequences for PEgRNA spacers, PBS, RTT, and ngRNA spacers for a prime editing system comprising a nuclease that recognizes the PAM sequence “NNGRRT.” In some embodiments, a PAM motif on the edit strand comprises an “NNGRRT” motif, wherein N is any nucleotide and R is A or G. In some embodiments, a PEgRNA of this disclosure is part of a prime editing system that recognizes the PAM motif AAGGGT. In some embodiments, the PEgRNA recognizes the PAM motif GGGGAT.

[0347] Provided herein in some embodiments are example sequences for PEgRNA spacers, PBS, RTT, and ngRNA spacers for a prime editor complex comprising a nuclease that recognizes the PAM sequence “NGA.” In some embodiments, a PAM motif on the edit strand comprises an “NGA” motif, wherein N is any nucleotide.

[0348] Provided herein in some embodiments are example sequences for PEgRNA spacers, PBS, RTT, and ngRNA spacers for a prime editor complex comprising a nuclease that recognizes the PAM sequence “NGN.” In some embodiments, a PAM motif on the edit strand comprises an “NGN” motif, wherein N is any nucleotide.

[0349] Provided herein in some embodiments are example sequences for PEgRNA spacers, PBS, RTT, and ngRNA spacers for a prime editor complex comprising a nuclease that recognizes the PAM sequence “NGA.” In some embodiments, a PAM motif on the edit strand comprises an “NRN” motif, wherein N is any nucleotide and R is A or G.

[0350] In some embodiments, a PEgRNA comprises a single polynucleotide molecule that comprises the spacer sequence, the gRNA core, and the extension arm. In some embodiments, a PEgRNA comprises multiple polynucleotide molecules, for example, two polynucleotide molecules. In some embodiments, a PEgRNA comprise a first polynucleotide molecule that comprises the spacer and a portion of the gRNA core, and a second polynucleotide molecule that comprises the rest of the gRNA core and the extension arm. In some embodiments, the gRNA core portion in the first polynucleotide molecule and the gRNA core portion in the second polynucleotide molecule are at least partly complementary to each other. In some embodiments, the PEgRNA can comprise a first polynucleotide comprising the spacer and a first portion of a gRNA core comprising, which can be also be referred to as a crRNA. In some embodiments, the PEgRNA comprise a second polynucleotide comprising a second portion of the gRNA core and the extension arm, wherein the second portion of the gRNA core may also be referred to as a trans-activating crRNA, or tracr RNA. In some embodiments, the crRNA portion and the tracr RNA portion of the gRNA core are at least partially complementary to each other. In some embodiments, the partially complementary portions of the crRNA and the tracr RNA form a lower stem, a bulge, and an upper stem.

[0351] In some embodiments, a spacer sequence comprises a region that has substantial complementarity to a search target sequence on the target strand of a double stranded target DNA. In some embodiments, the spacer sequence of a PEgRNA is identical or substantially identical to a protospacer sequence on the edit strand of the target gene (except that the protospacer sequence comprises thymine and the spacer sequence may comprise uracil). In some embodiments, the spacer sequence is at least about 70%, 75%, 80%, 85%, 90%, 95%, or 100% complementary to a search target sequence in the target gene. In some embodiments, the spacer comprises is substantially complementary to the search target sequence. In some embodiments, a spacer may guide a prime editing complex to a genomic locus with identical sequence during prime editing.

[0352] In some embodiments, the length of the spacer varies from at least 10 nucleotides to 100 nucleotides. For examples, a spacer may be at least 10 nucleotides, at least 11 nucleotides, at least 12 nucleotides, at least 13 nucleotides, at least 14 nucleotides, at least 15 nucleotides, at least 16 nucleotides, at least 17 nucleotides, at least 18 nucleotides, at least 19 nucleotides, at least 20 nucleotides, at least 30 nucleotides, at least 40 nucleotides, at least 50 nucleotides, at least 60 nucleotides, at least 70 nucleotides, at least 80 nucleotides, at least 90 nucleotides, at least 100 nucleotides. In some embodiments, the spacer is 16 nucleotides, 17 nucleotides, 18 nucleotides, 19 nucleotides, 20 nucleotides, 21 nucleotides, 22 nucleotides, 23 nucleotides, 24 nucleotides, or 25 nucleotides in length. In some embodiments, the spacer is from 15 nucleotides to 30 nucleotides in length, 15 to 25 nucleotides in length, 18 to 22 nucleotides in length, 10 to 20 nucleotides in length, 20 to 30 nucleotides in length, 30 to 40 nucleotides in length, 40 to 50 nucleotides in length, 50 to 60 nucleotides in length, 60 to 70 nucleotides in length, 70 to 80 nucleotides in length, or 90 nucleotides to 100 nucleotides in length. In some embodiments, the spacer is 20 nucleotides in length. In some embodiments, the spacer is 17 to 18 nucleotides in length.

[0353] In some embodiments, the spacer comprises a first spacer sequence comprising the 5′ half of the spacer and a second spacer sequence comprising the 3′ half of the spacer, wherein the tag sequence is between the first spacer sequence and the second spacer sequence. In some embodiments, the tag sequence does not have substantial complementarity to the spacer. In some embodiments, the tag does not have complementarity to the spacer.

[0354] As used herein in a PEgRNA or a nick guide RNA sequence, or fragments thereof such as a spacer, PBS, or RTT sequence, unless indicated otherwise, it should be appreciated that the letter “T” or “thymine” indicates a nucleobase in a DNA sequence that encodes the PEgRNA or guide RNA sequence, and is intended to refer to a uracil (U) nucleobase of the PEgRNA or guide RNA or any chemically modified uracil nucleobase known in the art, such as 5-methoxyuracil.

[0355] The extension arm of a PEgRNA can comprise a primer binding site (PBS) and an editing template (e.g., an RTT). The extension arm may be partially complementary to the spacer. In some embodiments, the editing template (e.g., RTT) is partially complementary to the spacer. In some embodiments, the editing template (e.g., RTT) and the primer binding site (PBS) are each partially complementary to the spacer.

[0356] An extension arm of a PEgRNA can comprise a primer binding site sequence (PBS, or PBS sequence) that hybridizes with a free 3′ end of a single stranded DNA in the target generated by nicking with a prime editor. The length of the PBS sequence may vary depending on, e.g., the prime editor components, the search target sequence and other components of the PEgRNA. In some embodiments, the length of the primer binding site (PBS) varies from at least 2 nucleotides to 50 nucleotides. For examples, a primer binding site (PBS) may be at least 2 nucleotides, at least 3 nucleotides, at least 4 nucleotides, at least 5 nucleotides, at least 6 nucleotides, at least 7 nucleotides, at least 8 nucleotides, at least 9 nucleotides, at least 10 nucleotides, at least 11 nucleotides, at least 12 nucleotides, at least 13 nucleotides, at least 14 nucleotides, at least 15 nucleotides, at least 16 nucleotides, at least 17 nucleotides, at least 18 nucleotides, at least 19 nucleotides, at least 20 nucleotides, at least 30 nucleotides, at least 40 nucleotides, or at least 50 nucleotides in length. In some embodiments, the PBS is at least 6 nucleotides in length. In some embodiments, the PBS is about 4 to 16 nucleotides, about 6 to 16 nucleotides, about 6 to 18 nucleotides, about 6 to 20 nucleotides, about 8 to 20 nucleotides, about 10 to 20 nucleotides, about 12 to 20 nucleotides, about 14 to 20 nucleotides, about 16 to 20 nucleotides, or about 18 to 20 nucleotides in length. In some embodiments, the PBS is about 7 to 15 nucleotides in length. In some embodiments, the PBS is 6, 7, 8, 9, 10, 11, 12, 13, 14, 15, 16, 17, 18, 19, or 20 nucleotides in length. In some embodiments, the PBS is 8, 9, 10, 11, 12, 13, or 14 nucleotides in length.

[0357] The PBS can be complementary or substantially complementary to a DNA sequence in the edit strand of the target gene. By annealing with the edit strand at a free hydroxy group, e.g., a free 3′ end generated by prime editor nicking, the PBS can initiate synthesis of a new single stranded DNA encoded by the editing template at the nick site. In some embodiments, the PBS is at least about 70%, 75%, 80%, 85%, 90%, 95%, or 100% complementary to a region of the edit strand of the target gene. In some embodiments, the PBS is perfectly complementary, or 100% complementary, to a region of the edit strand of the target gene.

[0358] An extension arm of a PEgRNA may comprise an editing template that serves as a DNA synthesis template for the DNA polymerase in a prime editor during prime editing.

[0359] The length of an editing template can vary depending on, e.g., the prime editor components, the search target sequence, and other components of the PEgRNA. In some embodiments, the editing template serves as a DNA synthesis template for a reverse transcriptase, and the editing template is referred to as a reverse transcription editing template (RTT).

[0360] The editing template (e.g., RTT), in some embodiments, is 2, 3, 4, 5, 6, 7, 8, 9, 10, 11, 12, 13, 14, 15, 16, 17, 18, 19, 20, 21, 22, 23, 24, or 25 nucleotides in length. In some embodiments, the RTT is 12, 13, 14, 15, 16, 17, 18, 19, 20, 21, 22, 23, 24, or 25 nucleotides in length. In some embodiments, the RTT is 16, 17, 18, 19, 20, 21, 22, 23, 24, 25, 26, 27, 28, 29, 30, 31, 32, 33, 34, 35, 36, 37, 38, 39, or 40 nucleotides in length.

[0361] In some embodiments, the editing template (e.g., RTT) sequence is about 70%, 75%, 80%, 85%, 90%, 95%, or 99% complementary to the editing target sequence on the edit strand of the target gene. In some embodiments, the editing template sequence (e.g., RTT) is substantially complementary to the editing target sequence. In some embodiments, the editing template sequence (e.g., RTT) is complementary to the editing target sequence except at positions of the intended nucleotide edits to be incorporated into the target gene. In some embodiments, the editing template comprises a nucleotide sequence comprising about 85% to about 95% complementarity to an editing target sequence in the edit strand in the target gene. In some embodiments, the editing template comprises about 86%, about 87%, about 88%, about 89%, about 90%, about 91%, about 92%, about 93%, about 94%, about 95%, about 96%, about 97%, about 98%, or about 99% complementarity to an editing target sequence in the edit strand of the target gene.

[0362] Nucleotide Editing

[0363] An intended nucleotide edit in an editing template of a PEgRNA may comprise various types of alterations as compared to the target gene sequence. In some embodiments, the nucleotide edit is a single nucleotide substitution as compared to the target gene sequence. In some embodiments, the nucleotide edit is a deletion as compared to the target gene sequence. In some embodiments, the nucleotide edit is an insertion as compared to the target gene sequence. In some embodiments, the editing template comprises one to ten intended nucleotide edits as compared to the target gene sequence. In some embodiments, the editing template comprises one or more intended nucleotide edits as compared to the target gene sequence. In some embodiments, the editing template comprises two or more intended nucleotide edits as compared to the target gene sequence. In some embodiments, the editing template comprises three or more intended nucleotide edits as compared to the target gene sequence. In some embodiments, the editing template comprises four or more, five or more, or six or more intended nucleotide edits as compared to the target gene sequence. In some embodiments, the editing template comprises two single nucleotide substitutions, insertions, deletions, or any combination thereof, as compared to the target gene sequence. In some embodiments, the editing template comprises three single nucleotide substitutions, insertions, deletions, or any combination thereof, as compared to the target gene sequence. In some embodiments, the editing template comprises four, five, or six single nucleotide substitutions, insertions, deletions, or any combination thereof, as compared to the target gene sequence. In some embodiments, a nucleotide substitution comprises an adenine (A)-to-thymine (T) substitution. In some embodiments, a nucleotide substitution comprises an A-to-guanine (G) substitution. In some embodiments, a nucleotide substitution comprises an A-to-cytosine (C) substitution. In some embodiments, a nucleotide substitution comprises a T-A substitution. In some embodiments, a nucleotide substitution comprises a T-G substitution. In some embodiments, a nucleotide substitution comprises a T-C substitution. In some embodiments, a nucleotide substitution comprises a G-to-A substitution. In some embodiments, a nucleotide substitution comprises a G-to-T substitution. In some embodiments, a nucleotide substitution comprises a G-to-C substitution. In some embodiments, a nucleotide substitution comprises a C-to-A substitution. In some embodiments, a nucleotide substitution comprises a C-to-T substitution. In some embodiments, a nucleotide substitution comprises a C-to-G substitution.

[0364] In some embodiments, a nucleotide insertion is at least 5 nucleotides, at least 6 nucleotides, at least 7 nucleotides, at least 8 nucleotides, at least 9 nucleotides, at least 10 nucleotides, at least 11 nucleotides, at least 12 nucleotides, at least 13 nucleotides, at least 14 nucleotides, at least 15 nucleotides, at least 16 nucleotides, at least 17 nucleotides, at least 18 nucleotides, at least 19 nucleotides, or at least 20 nucleotides in length. In some embodiments, a nucleotide insertion is from 1 to 2 nucleotides, from 1 to 3 nucleotides, from 1 to 4 nucleotides, from 1 to 5 nucleotides, form 2 to 5 nucleotides, from 3 to 5 nucleotides, from 3 to 6 nucleotides, from 3 to 8 nucleotides, from 4 to 9 nucleotides, from 5 to 10 nucleotides, from 6 to 11 nucleotides, from 7 to 12 nucleotides, from 8 to 13 nucleotides, from 9 to 14 nucleotides, from 10 to 15 nucleotides, from 11 to 16 nucleotides, from 12 to 17 nucleotides, from 13 to 18 nucleotides, from 14 to 19 nucleotides, from 15 to 20 nucleotides in length. In some embodiments, a nucleotide insertion is a single nucleotide insertion. In some embodiments, a nucleotide insertion comprises insertion of two nucleotides.

[0365] The editing template of a PEgRNA can comprise one or more intended nucleotide edits, compared to the target gene to be edited. Position of the intended nucleotide edit(s) relevant to other components of the PEgRNA, or to particular nucleotides (e.g., mutations) in the target gene can vary. In some embodiments, the nucleotide edit is in a region of the PEgRNA corresponding to or homologous to the protospacer sequence. In some embodiments, the nucleotide edit is in a region of the PEgRNA corresponding to a region of the target gene outside of the protospacer sequence.

[0366] In some embodiments, the position of a nucleotide edit incorporation in the target gene can be determined based on position of the protospacer adjacent motif (PAM). For instance, the intended nucleotide edit may be installed in a sequence corresponding to the protospacer adjacent motif (PAM) sequence. In some embodiments, a nucleotide edit in the editing template is at a position corresponding to the 5′ most nucleotide of the PAM sequence. In some embodiments, a nucleotide edit in the editing template is at a position corresponding to the 3′ most nucleotide of the PAM sequence. In some embodiments, position of an intended nucleotide edit in the editing template may be referred to by aligning the editing template with the partially complementary edit strand of the target gene, and referring to nucleotide positions on the editing strand where the intended nucleotide edit is incorporated. In some embodiments, a nucleotide edit is incorporated at a position corresponding to about 0, 1, 2, 3, 4, 5, 6, 7, 8, 9, 10, 11, 12, 13, 14, 15, 16, 17, 18, 19, 20, 21, 22, 23, 24, 25, 26, 27, 28, 29, 30, 31, 32, 33, 34, 35, 36, 37, 38, 39, or 40 base pairs upstream of the 5′ most nucleotide of the PAM sequence in the edit strand of the target gene. By 0 base pair upstream or downstream of a reference position, it is meant that the intended nucleotide is immediately upstream or downstream of the reference position. In some embodiments, a nucleotide edit is incorporated at a position corresponding to about 0 to 2 base pairs, 0 to 4 base pairs, 0 to 6 base pairs, 0 to 8 base pairs, 0 to 10 base pairs, 2 to 4 base pairs, 2 to 6 base pairs, 2 to 8 base pairs, 2 to 10 base pairs, 2 to 12 base pairs, 4 to 6 base pairs, 4 to 8 base pairs, 4 to 10 base pairs, 4 to 12 base pairs, 4 to 14 base pairs, 6 to 8 base pairs, 6 to 10 base pairs, 6 to 12 base pairs, 6 to 14 base pairs, 6 to 16 base pairs, 8 to 10 base pairs, 8 to 12 base pairs, 8 to 14 base pairs, 8 to 16 base pairs, 8 to 18 base pairs, 10 to 12 base pairs, 10 to 14 base pairs, 10 to 16 base pairs, 10 to 18 base pairs, 10 to 20 base pairs, 12 to 14 base pairs, 12 to 16 base pairs, 12 to 18 base pairs, 12 to 20 base pairs, 12 to 22 base pairs, 14 to 16 base pairs, 14 to 18 base pairs, 14 to 20 base pairs, 14 to 22 base pairs, 14 to 24 base pairs, 16 to 18 base pairs, 16 to 20 base pairs, 16 to 22 base pairs, 16 to 24 base pairs, 16 to 26 base pairs, 18 to 20 base pairs, 18 to 22 base pairs, 18 to 24 base pairs, 18 to 26 base pairs, 18 to 28 base pairs, 20 to 22 base pairs, 20 to 24 base pairs, 20 to 26 base pairs, 20 to 28 base pairs, or 20 to 30 base pairs upstream of the 5′ most nucleotide of the PAM sequence. In some embodiments, the nucleotide edit is incorporated at a position corresponding to 3 base pairs upstream of the 5′ most nucleotide of the PAM sequence. In some embodiments, the nucleotide edit in is incorporated at a position corresponding to 4 base pairs upstream of the 5′ most nucleotide of the PAM sequence. In some embodiments, the nucleotide edit is incorporated at a position corresponding to 5 base pairs upstream of the 5′ most nucleotide of the PAM sequence. In some embodiments, the nucleotide edit in the editing template is at a position corresponding to 6 base pairs upstream of the 5′ most nucleotide of the PAM sequence.

[0367] In some embodiments, an intended nucleotide edit is incorporated at a position corresponding to about 0, 1, 2, 3, 4, 5, 6, 7, 8, 9, 10, 11, 12, 13, 14, 15, 16, 17, 18, 19, 20, 21, 22, 23, 24, 25, 26, 27, 28, 29, 30, 31, 32, 33, 34, 35, 36, 37, 38, 39, or 40 base pairs downstream of the 5′ most nucleotide of the PAM sequence in the edit strand of the target gene. In some embodiments, a nucleotide edit is incorporated at a position corresponding to about 0 to 2 base pairs, 0 to 4 base pairs, 0 to 6 base pairs, 0 to 8 base pairs, 0 to 10 base pairs, 2 to 4 base pairs, 2 to 6 base pairs, 2 to 8 base pairs, 2 to 10 base pairs, 2 to 12 base pairs, 4 to 6 base pairs, 4 to 8 base pairs, 4 to 10 base pairs, 4 to 12 base pairs, 4 to 14 base pairs, 6 to 8 base pairs, 6 to 10 base pairs, 6 to 12 base pairs, 6 to 14 base pairs, 6 to 16 base pairs, 8 to 10 base pairs, 8 to 12 base pairs, 8 to 14 base pairs, 8 to 16 base pairs, 8 to 18 base pairs, 10 to 12 base pairs, 10 to 14 base pairs, 10 to 16 base pairs, 10 to 18 base pairs, 10 to 20 base pairs, 12 to 14 base pairs, 12 to 16 base pairs, 12 to 18 base pairs, 12 to 20 base pairs, 12 to 22 base pairs, 14 to 16 base pairs, 14 to 18 base pairs, 14 to 20 base pairs, 14 to 22 base pairs, 14 to 24 base pairs, 16 to 18 base pairs, 16 to 20 base pairs, 16 to 22 base pairs, 16 to 24 base pairs, 16 to 26 base pairs, 18 to 20 base pairs, 18 to 22 base pairs, 18 to 24 base pairs, 18 to 26 base pairs, 18 to 28 base pairs, 20 to 22 base pairs, 20 to 24 base pairs, 20 to 26 base pairs, 20 to 28 base pairs, or 20 to 30 base pairs downstream of the 5′ most nucleotide of the PAM sequence. In some embodiments, a nucleotide edit is incorporated at a position corresponding to 3 base pairs downstream of the 5′ most nucleotide of the PAM sequence. In some embodiments, a nucleotide edit is incorporated at a position corresponding to 4 base pairs downstream of the 5′ most nucleotide of the PAM sequence. In some embodiments, a nucleotide edit is incorporated at a position corresponding to 5 base pairs downstream of the 5′ most nucleotide of the PAM sequence. In some embodiments, a nucleotide edit is incorporated at a position corresponding to 6 base pairs downstream of the 5′ most nucleotide of the PAM sequence. By “upstream” and “downstream” it is intended to define relevant positions at least two regions or sequences in a nucleic acid molecule orientated in a 5′-to-3′ direction. For example, a first sequence is upstream of a second sequence in a DNA molecule where the first sequence is positioned 5′ to the second sequence. Accordingly, the second sequence is downstream of the first sequence.

[0368] In some embodiments, the position of a nucleotide edit incorporation in the target gene can be determined based on position of the nick site. In some embodiments, position of an intended nucleotide edit is 0, 1, 2, 3, 4, 5, 6, 7, 8, 9, 10, 11, 12, 13, 14, 15, 16, 17, 18, 19, 20, 21, 22, 23, 24, 25, 26, 27, 28, 29, 30, 31, 32, 33, 34, 35, 36, 37, 38, 39, 40, 45, 50, 55, 60, 65, 70, 75, 80, 85, 90, 95, 100, 110, 120, 130, 140, or 150 nucleotides apart from the nick site. In some embodiments, position of an intended nucleotide edit is 0, 1, 2, 3, 4, 5, 6, 7, 8, 9, 10, 11, 12, 13, 14, 15, 16, 17, 18, 19, 20, 21, 22, 23, 24, 25, 26, 27, 28, 29, 30, 31, 32, 33, 34, 35, 36, 37, 38, 39, 40, 45, 50, 55, 60, 65, 70, 75, 80, 85, 90, 95, 100, 110, 120, 130, 140, or 150 nucleotides downstream of the nick site on the PAM strand (or the non-target strand, or the edit strand) of the double stranded target DNA. In some embodiments, position of the intended nucleotide edit in the editing template can be referred to by aligning the editing template with the partially complementary editing target sequence on the edit strand and referring to nucleotide positions on the editing strand where the intended nucleotide edit is incorporated. Accordingly, in some embodiments, a nucleotide edit in an editing template is at a position corresponding to a position about 0, 1, 2, 3, 4, 5, 6, 7, 8, 9, 10, 11, 12, 13, 14, 15, 16, 17, 18, 19, 20, 21, 22, 23, 24, 25, 26, 27, 28, 29, 30, 31, 32, 33, 34, 35, 36, 37, 38, 39, 40, 45, 50, 55, 60, 65, 70, 75, 80, 85, 90, 95, 100, 110, 120, 130, 140, or 150 nucleotides apart from the nick site. In some embodiments, a nucleotide edit in an editing template is at a position corresponding to a position about 0 to 2 nucleotides, 0 to 4 nucleotides, 0 to 6 nucleotides, 0 to 8 nucleotides, 0 to 10 nucleotides, 2 to 4 nucleotides, 2 to 6 nucleotides, 2 to 8 nucleotides, 2 to 10 nucleotides, 2 to 12 nucleotides, 4 to 6 nucleotides, 4 to 8 nucleotides, 4 to 10 nucleotides, 4 to 12 nucleotides, 4 to 14 nucleotides, 6 to 8 nucleotides, 6 to 10 nucleotides, 6 to 12 nucleotides, 6 to 14 nucleotides, 6 to 16 nucleotides, 8 to 10 nucleotides, 8 to 12 nucleotides, 8 to 14 nucleotides, 8 to 16 nucleotides, 8 to 18 nucleotides, 10 to 12 nucleotides, 10 to 14 nucleotides, 10 to 16 nucleotides, 10 to 18 nucleotides, 10 to 20 nucleotides, 12 to 14 nucleotides, 12 to 16 nucleotides, 12 to 18 nucleotides, 12 to 20 nucleotides, 12 to 22 nucleotides, 14 to 16 nucleotides, 14 to 18 nucleotides, 14 to 20 nucleotides, 14 to 22 nucleotides, 14 to 24 nucleotides, 16 to 18 nucleotides, 16 to 20 nucleotides, 16 to 22 nucleotides, 16 to 24 nucleotides, 16 to 26 nucleotides, 18 to 20 nucleotides, 18 to 22 nucleotides, 18 to 24 nucleotides, 18 to 26 nucleotides, 18 to 28 nucleotides, 20 to 22 nucleotides, 20 to 24 nucleotides, 20 to 26 nucleotides, 20 to 28 nucleotides, 20 to 30 nucleotides, 30 to 40 nucleotides, 40 to 50 nucleotides, 50 to 60 nucleotides, 60 to 70 nucleotides, 70 to 80 nucleotides, 80 to 90 nucleotides, 90 to 100 nucleotides, 100 to 110 nucleotides, 110 to 120 nucleotides, 120 to 130 nucleotides, 130 to 140 nucleotides, or 140 to 150 nucleotides apart from the nick site. In some embodiments, when referred to in the context of the PAM strand (or the non-target strand, or the edit strand), a nucleotide edit in an editing template is at a position corresponding to a position about 0 to 2 nucleotides, 0 to 4 nucleotides, 0 to 6 nucleotides, 0 to 8 nucleotides, 0 to 10 nucleotides, 2 to 4 nucleotides, 2 to 6 nucleotides, 2 to 8 nucleotides, 2 to 10 nucleotides, 2 to 12 nucleotides, 4 to 6 nucleotides, 4 to 8 nucleotides, 4 to 10 nucleotides, 4 to 12 nucleotides, 4 to 14 nucleotides, 6 to 8 nucleotides, 6 to 10 nucleotides, 6 to 12 nucleotides, 6 to 14 nucleotides, 6 to16 nucleotides, 8 to 10 nucleotides, 8 to 12 nucleotides, 8 to 14 nucleotides, 8 to 16 nucleotides, 8 to 18 nucleotides, 10 to 12 nucleotides, 10 to 14 nucleotides, 10 to 16 nucleotides, 10 to 18 nucleotides, 10 to 20 nucleotides, 12 to 14 nucleotides, 12 to 16 nucleotides, 12 to 18 nucleotides, 12 to 20 nucleotides, 12 to 22 nucleotides, 14 to 16 nucleotides, 14 to 18 nucleotides, 14 to 20 nucleotides, 14 to 22 nucleotides, 14 to 24 nucleotides, 16 to 18 nucleotides, 16 to 20 nucleotides, 16 to 22 nucleotides, 16 to 24 nucleotides, 16 to 26 nucleotides, 18 to 20 nucleotides, 18 to 22 nucleotides, 18 to 24 nucleotides, 18 to 26 nucleotides, 18 to 28 nucleotides, 20 to 22 nucleotides, 20 to 24 nucleotides, 20 to 26 nucleotides, 20 to 28 nucleotides, 20 to 30 nucleotides, 30 to 40 nucleotides, 40 to 50 nucleotides, 50 to 60 nucleotides, 60 to 70 nucleotides, 70 to 80 nucleotides, 80 to 90 nucleotides, 90 to 100 nucleotides, 100 to 110 nucleotides, 110 to 120 nucleotides, 120 to 130 nucleotides, 130 to 140 nucleotides, or 140 to 150 nucleotides downstream from the nick site. The relative positions of the intended nucleotide edit(s) and nick site may be referred to by numbers. For example, in some embodiments, the nucleotide immediately downstream of the nick site on a PAM strand (or the non-target strand, or the edit strand) may be referred to as at position 0. The nucleotide immediately upstream of the nick site on the PAM strand (or the non-target strand, or the edit strand) may be referred to as at position −1. The nucleotides downstream of position 0 on the PAM strand can be referred to as at positions +1, +2, +3, +4, . . . +n, and the nucleotides upstream of position −1 on the PAM strand may be referred to as at positions −2, −3, −4, . . . , −n. Accordingly, in some embodiments, the nucleotide in the editing template that corresponds to position 0 when the editing template is aligned with the partially complementary editing target sequence by complementarity can also be referred to as position 0 in the editing template, the nucleotides in the editing template corresponding to the nucleotides at positions +1, +2, +3, +4, . . . , +n on the PAM strand of the double stranded target DNA can also be referred to as at positions +1, +2, +3, +4, . . . , +n in the editing template, and the nucleotides in the editing template corresponding to the nucleotides at positions −1, −2, −3, −4, . . . , −n on the PAM strand on the double stranded target DNA may also be referred to as at positions −1, −2, −3, −4, . . . , −n on the editing template, even though when the PEgRNA is viewed as a standalone nucleic acid, positions +1, +2, +3, +4, . . . , +n are 5′ of position 0 and positions −1, −2, −3, −4, . . . −n are 3′ of position 0 in the editing template. In some embodiments, an intended nucleotide edit is at position+n of the editing template relative to position 0. Accordingly, the intended nucleotide edit may be incorporated at position+n of the PAM strand of the double stranded target DNA (and subsequently, the target strand of the double stranded target DNA) by prime editing. The number n may be referred to as the nick to edit distance.

[0369] When referred to in the PEgRNA, positions of the one or more intended nucleotide edits may be referred to relevant to components of the PEgRNA. For example, an intended nucleotide edit may be 5′ or 3′ to the PBS. In some embodiments, a PEgRNA comprises the structure, from 5′ to 3′: a spacer, a gRNA core, an editing template, and a PBS. In some embodiments, the intended nucleotide edit is 0, 1, 2, 3, 4, 5, 6, 7, 8, 9, 10, 11, 12, 13, 14, 15, 16, 17, 18, 19, 20, 21, 22, 23, 24, 25, 26, 27, 28, 29, 30, 31, 32, 33, 34, 35, 36, 37, 38, 39, or 40 base pairs upstream to the 5′ most nucleotide of the PBS. In some embodiments, the intended nucleotide edit is 0 to 2 base pairs, 0 to 4 base pairs, 0 to 6 base pairs, 0 to 8 base pairs, 0 to 10 base pairs, 2 to 4 base pairs, 2 to 6 base pairs, 2 to 8 base pairs, 2 to 10 base pairs, 2 to 12 base pairs, 4 to 6 base pairs, 4 to 8 base pairs, 4 to 10 base pairs, 4 to 12 base pairs, 4 to 14 base pairs, 6 to 8 base pairs, 6 to 10 base pairs, 6 to 12 base pairs, 6 to 14 base pairs, 6 to 16 base pairs, 8 to 10 base pairs, 8 to 12 base pairs, 8 to 14 base pairs, 8 to 16 base pairs, 8 to 18 base pairs, 10 to 12 base pairs, 10 to 14 base pairs, 10 to 16 base pairs, 10 to 18 base pairs, 10 to 20 base pairs, 12 to 14 base pairs, 12 to 16 base pairs, 12 to 18 base pairs, 12 to 20 base pairs, 12 to 22 base pairs, 14 to 16 base pairs, 14 to 18 base pairs, 14 to 20 base pairs, 14 to 22 base pairs, 14 to 24 base pairs, 16 to 18 base pairs, 16 to 20 base pairs, 16 to 22 base pairs, 16 to 24 base pairs, 16 to 26 base pairs, 18 to 20 base pairs, 18 to 22 base pairs, 18 to 24 base pairs, 18 to 26 base pairs, 18 to 28 base pairs, 20 to 22 base pairs, 20 to 24 base pairs, 20 to 26 base pairs, 20 to 28 base pairs, or 20 to 30 base pairs upstream to the 5′ most nucleotide of the PBS.

[0370] The corresponding positions of the intended nucleotide edit incorporated in the target gene may also be referred to be based on the nicking position generated by a prime editor based on sequence homology and complementarity. For example, in embodiments, the distance between the nucleotide edits to be incorporated into the target gene and the nick generated by the prime editor may be determined when the spacer hybridizes with the search target sequence and the extension arm hybridizes with the editing target sequence. In certain embodiments, the position of the nucleotide edit can be in any position downstream of the nick site on the edit strand (or the PAM strand) generated by the prime editor, such that the distance between the nick site and the intended nucleotide edit is 0, 1, 2, 3, 4, 5, 6, 7, 8, 9, 10, 11, 12, 13, 14, 15, 16, 17, 18, 19, 20, 21, 22, 23, 24, 25, 26, 27, 28, 29, or 30 nucleotides in length. In some embodiments, the position of the nucleotide edit is 0, 1, 2, 3, 4, 5, 6, 7, 8, 9, 10, 11, 12, 13, 14, 15, 16, 17, 18, 19, 20, 21, 22, 23, 24, 25, 26, 27, 28, 29, or 30 nucleotides upstream of the nick site on the edit strand. In some embodiments, the position of the nucleotide edit is 0, 1, 2, 3, 4, 5, 6, 7, 8, 9, 10, 11, 12, 13, 14, 15, 16, 17, 18, 19, 20, 21, 22, 23, 24, 25, 26, 27, 28, 29, or 30 nucleotides downstream of the nick site on the edit strand. In some embodiments, the position of the nucleotide edit is 0 base pairs from the nick site on the edit strand, that is, the editing position is at the same position as the nick site. As used herein, the distance between the nick site and the nucleotide edit, for example, where the nucleotide edit comprises an insertion or deletion, refers to the 5′ most position of the nucleotide edit for a nick that creates a 3′ free end on the edit strand (i.e., the “near position” of the nucleotide edit to the nick site). Similarly, as used herein, the distance between the nick site and a PAM position edit, for example, where the nucleotide edit comprises an insertion, deletion, or substitution of two or more contiguous nucleotides, refers to the 5′ most position of the nucleotide edit and the 5′ most position of the PAM sequence.

[0371] In some embodiments, the editing template extends beyond a nucleotide edit to be incorporated to the target gene sequence. For example, in some embodiments, the editing template comprises at least 1, 2, 3, 4, 5, 6, 7, 8, 9, 10, 11, 12, 13, 14, 15, 16, 17, 18, 19, 20, 21, 22, 23, 24, 25, 26, 27, 28, 29 or 30 base pairs 3′ to the nucleotide edit to be incorporated to the target gene sequence. In some embodiments, the editing template comprises at least 4 to 30 base pairs 3′ to the nucleotide edit to be incorporated to the target gene sequence. In some embodiments, the editing template comprises at least 4 to 25 base pairs 3′ to the nucleotide edit to be incorporated to the target gene sequence. In some embodiments, the editing template comprises at least 4 to 20 base pairs 3′ to the nucleotide edit to be incorporated to the target gene sequence. In some embodiments, the editing template comprises at least 4 to 30 base pairs 5′ to the nucleotide edit to be incorporated to the target gene sequence. In some embodiments, the editing template comprises at least 4 to 25 base pairs 5′ to the nucleotide edit to be incorporated to the target gene sequence. In some embodiments, the editing template comprises at least 4 to 20 base pairs 5′ to the nucleotide edit to be incorporated to the target gene sequence.

[0372] In some embodiments, the editing template comprises an adenine at the first nucleobase position (e.g., for a PEgRNA following 5′-spacer-gRNA core-RTT-PBS-3′ orientation, the 5′ most nucleobase is the “first base”). In some embodiments, the editing template comprises a guanine at the first nucleobase position (e.g., for a PEgRNA following 5 ‘-spacer-gRNA core-RTT-PBS-3’ orientation, the 5′ most nucleobase is the “first base”). In some embodiments, the editing template comprises an uracil at the first nucleobase position (e.g., for a PEgRNA following 5′-spacer-gRNA core-RTT-PBS-3′ orientation, the 5′ most nucleobase is the “first base”). In some embodiments, the editing template comprises a cytosine at the first nucleobase position (e.g., for a PEgRNA following 5′-spacer-gRNA core-RTT-PBS-3′ orientation, the 5′ most nucleobase is the “first base”). In some embodiments, the editing template does not comprise a cytosine at the first nucleobase position (e.g., for a PEgRNA following 5′-spacer-gRNA core-RTT-PBS-3′ orientation, the 5′ most nucleobase is the “first base”).

[0373] The editing template of a PEgRNA may encode a new single stranded DNA (e.g. by reverse transcription) to replace a target sequence in the target gene. In some embodiments, the editing target sequence in the edit strand of the target gene is replaced by the newly synthesized strand, and the nucleotide edit(s) are incorporated in the region of the target gene. In some embodiments, the target gene is a target gene. In some embodiments, the editing template of the PEgRNA encodes a newly synthesized single stranded DNA that comprises a wild type target gene sequence. In some embodiments, the newly synthesized DNA strand replaces the editing target sequence in the target gene, wherein the editing target sequence (or the endogenous sequence complementary to the editing target sequence on the target strand of the target gene) comprises a mutation compared to a wild type target gene.

[0374] In some embodiments, the editing target sequence comprises a mutation in an intron of the target gene as compared to a wild type target gene. In some embodiments, the editing target sequence comprises a mutation in an intron of the target gene that results in altered or aberrant splicing of a transcript encoded by the target gene compared to a transcript encoded by a wild type target gene.

[0375] In some embodiments, the editing template comprises one or more intended nucleotide edits compared to the sequence on the target strand of the target gene that is complementary to the editing target sequence. In some embodiments, the editing template encodes a single stranded DNA that comprises one or more intended nucleotide edits compared to the editing target sequence. In some embodiments, the single stranded DNA replaces the editing target sequence by prime editing, thereby incorporating the one or more intended nucleotide edits.

[0376] In some embodiments, incorporation of the one or more intended nucleotide edits corrects the mutation in the editing target sequence to wild type nucleotides at corresponding positions in the target gene. As used herein, “correcting” a mutation means restoring a wild type sequence at the place of the mutation in the double stranded target DNA, e.g., target gene, by prime editing. In some embodiments, the editing template comprises and/or encodes a wild type target gene sequence.

[0377] In some embodiments, incorporation of the one or more intended nucleotide edits does not correct the mutation in the editing target sequence to wild type sequence but allows for expression of a functional protein encoded by the target gene.

[0378] In some embodiments, the editing template comprises one or more intended nucleotide edits compared to the sequence on the target strand of the target gene that is complementary to the editing target sequence, wherein the one or more intended nucleotide edits is a single nucleotide substitution, polynucleotide substitution, nucleotide insertion, or nucleotide deletion. In some embodiments, the intended nucleotide edit in the editing template comprises a single nucleotide substitution, polynucleotide substitution, nucleotide insertion, or nucleotide deletion compared to the sequence on the target strand of the target gene that is complementary to the editing target at a position corresponding to a mutation in target gene, wherein the editing target sequence is on the sense strand of the target gene.

[0379] A guide RNA core (also referred to herein as the gRNA core, gRNA scaffold, or gRNA backbone sequence) of a PEgRNA may contain a polynucleotide sequence that binds to a DNA binding domain (e.g., Cas9) of a prime editor. The gRNA core may interact with a prime editor as described herein, for example, by association with a DNA binding domain, such as a DNA nickase of the prime editor.

[0380] One of skill in the art will recognize that different prime editors having different DNA binding domains from different DNA binding proteins may require different gRNA core sequences specific to the DNA binding protein. In some embodiments, the gRNA core is capable of binding to a Cas9-based prime editor. In some embodiments, the gRNA core is capable of binding to a Cpf1-based prime editor. In some embodiments, the gRNA core is capable of binding to a Cas12b-based prime editor.

[0381] In some embodiments, the gRNA core comprises regions and secondary structures involved in binding with specific CRISPR Cas proteins. For example, in a Cas9 based prime editing system, the gRNA core of a PEgRNA may comprise one or more regions of a base paired “lower stem” adjacent to the spacer sequence and a base paired “upper stem” following the lower stem, where the lower stem and upper stem may be connected by a “bulge” comprising unpaired RNAs. The gRNA core may further comprise a “nexus” distal from the spacer sequence, followed by a hairpin structure, e.g., at the 3′ end. In some embodiments, the gRNA core comprises modified nucleotides as compared to a wild type gRNA core in the lower stem, upper stem, and/or the hairpin. For example, nucleotides in the lower stem, upper stem, an/or the hairpin regions may be modified, deleted, or replaced. In some embodiments, RNA nucleotides in the lower stem, upper stem, an/or the hairpin regions may be replaced with one or more DNA sequences. In some embodiments, the gRNA core comprises unmodified or wild type RNA sequences in the nexus and/or the bulge regions. In some embodiments, the gRNA core does not include long stretches of A-T pairs, for example, a GUUUU-AAAAC pairing element. In some embodiments, the gRNA core comprises the sequence: GUUUUAGAGCUAGAAAUAGCAAGUUAAAAUAAGGCUAGUCCGUUAUCAACUUGAAA AAGUGGCACCGAGUCGGUGC (SEQ ID NO:933); GUUUGAGAGCUAGAAAUAGCAAGUUUAAAUAAGGCUAGUCCGUUAUCAACUUGAAA AAGUGGGACCGAGUCGGUCC (SEQ ID NO:896), or GUUUAAGAGCUAUGCUGGAAACAGCAUAGCAAGUUUAAAUAAGGCUAGUCCGUUAUC AACUUGAAAAAGUGGCACCGAGUCGGUGC (SEQ ID NO:899). In some embodiments, the gRNA core comprises the sequence

(SEQ ID NO: 933)
GUUUUAGAGCUAGAAAUAGCAAGUUAAAAUAAGGCUAGUCCGUUAUCAA
CUUGAAAAAGUGGCACCGAGUCGGUGC.

[0382] In some embodiments, the PEgRNA comprises a guide RNA (gRNA) core that associates with a DNA binding domain, e.g., a CRISPR-Cas protein domain, of a prime editor. In some embodiments, the gRNA core comprises a first gRNA core sequence comprising a 5′ half of the gRNA core and a second gRNA core sequence comprising a 3′ half of the gRNA core, and wherein the PEgRNA comprises, in 5′ to 3′ order: the spacer, the first gRNA core sequence, the editing template, the PBS, the tag sequence, and the second gRNA core sequence. The 5′ half and the 3′ half can form a functional gRNA core for association/binding with a programmable DNA binding protein, e.g., a Cas protein. One of skill in the art will recognize that different prime editors having different DNA binding domains from different DNA binding proteins may require different gRNA core sequences specific to the DNA binding protein. In some embodiments, the gRNA core is capable of binding to a Cas9-based prime editor.

[0383] Any gRNA core sequences known in the art are also contemplated in the prime editing compositions described herein.

[0384] A PEgRNA can also comprise optional modifiers, e.g., 3′ end modifier region and/or an 5′ end modifier region. In some embodiments, a PEgRNA comprises at least one nucleotide that is not part of a spacer, a gRNA core, or an extension arm. The optional sequence modifiers can be positioned within or between any of the other regions shown, and not limited to being located at the 3′ and 5′ ends. In certain embodiments, the PEgRNA comprises secondary RNA structure, such as, but not limited to, aptamers, hairpins, stem/loops, toeloops, and/or RNA-binding protein recruitment domains (e.g., the MS2 aptamer which recruits and binds to the MS2cp protein). In some embodiments, a PEgRNA comprises a short stretch of uracil at the 5′ end or the 3′ end. For example, in some embodiments, a PEgRNA comprising a 3′ extension arm comprises a “UUU” sequence at the 3′ end of the extension arm. In some embodiments, a PEgRNA comprises a toeloop sequence at the 3′ end. In some embodiments, the PEgRNA comprises a 3′ extension arm and a toeloop sequence at the 3′ end of the extension arm. In some embodiments, the PEgRNA comprises a 5′ extension arm and a toeloop sequence at the 5′ end of the extension arm. In some embodiments, the PEgRNA comprises a toeloop element having the sequence 5′-GAAANNNNN-3′, wherein N is any nucleobase. In some embodiments, the secondary RNA structure is positioned within the spacer. In some embodiments, the secondary structure is positioned within the extension arm. In some embodiments, the secondary structure is positioned within the gRNA core. In some embodiments, the secondary structure is positioned between the spacer and the gRNA core, between the gRNA core and the extension arm, or between the spacer and the extension arm. In some embodiments, the secondary structure is positioned between the PBS and the editing template. In some embodiments the secondary structure is positioned at the 3′ end or at the 5′ end of the PEgRNA. In some embodiments, the PEgRNA comprises a transcriptional termination signal at the 3′ end of the PEgRNA. In addition to secondary RNA structures, the PEgRNA may comprise a chemical linker or a poly(N) linker or tail, where “N” can be any nucleobase. In some embodiments, the chemical linker may function to prevent reverse transcription of the gRNA core.

[0385] In some embodiments, a PEgRNA or a nick guide RNA (ngRNA) can be chemically synthesized, or can be assembled or cloned and transcribed from a DNA sequence, e.g., a plasmid DNA sequence, or by any RNA oligonucleotide synthesis method known in the art. In some embodiments, DNA sequence that encodes a PEgRNA (or ngRNA) can be designed to append one or more nucleotides at the 5′ end or the 3′ end of the PEgRNA (or nick guide RNA) encoding sequence to enhance PEgRNA transcription. For example, in some embodiments, a DNA sequence that encodes a PEgRNA (or nick guide RNA) (or an ngRNA) can be designed to append a nucleotide G at the 5′ end. Accordingly, in some embodiments, the PEgRNA (or nick guide RNA) can comprise an appended nucleotide G at the 5′ end. In some embodiments, a DNA sequence that encodes a PEgRNA (or nick guide RNA) can be designed to append a sequence that enhances transcription, e.g., a Kozak sequence, at the 5′ end. In some embodiments, a DNA sequence that encodes a PEgRNA (or nick guide RNA) can be designed to append the sequence CACC or CCACC at the 5′ end. Accordingly, in some embodiments, the PEgRNA (or nick guide RNA) can comprise an appended sequence CACC or CCACC at the 5′ end. In some embodiments, a DNA sequence that encodes a PEgRNA (or nick guide RNA) can be designed to append the sequence TTT, TTTT, TTTTT, TTTTTT, TTTTTTT at the 3′ end. Accordingly, in some embodiments, the PEgRNA (or nick guide RNA) can comprise an appended sequence UUU, UUUU, UUUUU, UUUUUU, or UUUUUUU at the 3′ end. In some embodiments, a PEgRNA or ngRNA may include a modifying sequence at the 3′ end having the sequence AACAUUGACGCGUCUCUACGUGGGGGCGCG (SEQ ID NO: 934).

[0386] In some embodiments, a prime editing system or composition further comprises a nick guide polynucleotide, such as a nick guide RNA (ngRNA). Without wishing to be bound by any particular theory, the non-edit strand of a double stranded target DNA in the target gene may be nicked by a CRISPR-Cas nickase directed by an ngRNA. In some embodiments, the nick on the non-edit strand directs endogenous DNA repair machinery to use the edit strand as a template for repair of the non-edit strand, which may increase efficiency of prime editing. In some embodiments, the non-edit strand is nicked by a prime editor localized to the non-edit strand by the ngRNA. Accordingly, also provided herein are PEgRNA systems comprising at least one PEgRNA and at least one ngRNA.

[0387] In some embodiments, the ngRNA is a guide RNA which contains a variable spacer sequence and a guide RNA scaffold or core region that interacts with the DNA binding domain, e.g., Cas9 of the prime editor. In some embodiments, the ngRNA comprises a spacer sequence (referred to herein as an ng spacer, or a second spacer) that is substantially complementary to a second search target sequence (or ng search target sequence), which is located on the edit strand, or the non-target strand. Thus, in some embodiments, the ng search target sequence recognized by the ng spacer and the search target sequence recognized by the spacer sequence of the PEgRNA are on opposite strands of the double stranded target DNA of target gene. A prime editing system, composition, or complex comprising a ngRNA can be referred to as a “PE3” prime editing system, PE3 prime editing compositions, or PE3 prime editing complex.

[0388] In some embodiments, the ng search target sequence is located on the non-target strand, within 10 base pairs to 100 base pairs of an intended nucleotide edit incorporated by the PEgRNA on the edit strand. In some embodiments, the ng target search target sequence is within 10 bp, 20 bp, 30 bp, 40 bp, 50 bp, 60 bp, 70 bp, 80 bp, 90 bp, 91 bp, 92 bp, 93 bp, 94 bp, 95 bp, 96 bp, 97 bp, 98 bp, 99 bp, or 100 bp of an intended nucleotide edit incorporated by the PEgRNA on the edit strand. In some embodiments, the 5′ ends of the ng search target sequence and the PEgRNA search target sequence are within 1, 2, 3, 4, 5, 6, 7, 8, 9, or 10 bp apart from each other. In some embodiments, the 5′ ends of the ng search target sequence and the PEgRNA search target sequence are within 10 bp, 20 bp, 30 bp, 40 bp, 50 bp, 60 bp, 70 bp, 80 bp, 90 bp, 91 bp, 92 bp, 93 bp, 94 bp, 95 bp, 96 bp, 97 bp, 98 bp, 99 bp, or 100 bp apart from each other.

[0389] In some embodiments, an ng spacer sequence is complementary to, and may hybridize with the second search target sequence only after an intended nucleotide edit has been incorporated on the edit strand, by the editing template of a PEgRNA. Such a prime editing system may be referred to as a “PE3b” prime editing system or composition. In some embodiments, the ngRNA comprises a spacer sequence that matches only the edit strand after incorporation of the nucleotide edits, but not the endogenous target gene sequence on the edit strand. Accordingly, in some embodiments, an intended nucleotide edit is incorporated within the ng search target sequence. In some embodiments, the intended nucleotide edit is incorporated within about 1-10 nucleotides of the position corresponding to the PAM of the ng search target sequence.

[0390] In some embodiments, a PEgRNA (or ngRNA) comprises an additional secondary structure at the 5′ end. In some embodiments, a PEgRNA (or ngRNA) comprises an additional secondary structure at the 3′ end.

[0391] In some embodiments, the secondary structure comprises a pseudoknot. In some embodiments, the secondary structure comprises a pseudoknot derived from a virus. In some embodiments, the secondary structure comprises a pseudoknot of a Moloney murine leukemia virus (M-MLV) genome (a mpknot). In some embodiments, the secondary structure comprises a nucleotide sequence selected from the group consisting of GGGUCAGGAGCCCCCCCCCUGAACCCAGGAUAACCCUCAAAGUCGGGGGGCAACC (SEQ ID No: 935), GUCAGGGUCAGGAGCCCCCCCCCUGAACCCAGGAUAACCCUCAAAGUCGGGGGGCAA CCC (SEQ ID No: 859), GGGUCAGGAGCCCCCCCCCUGAACCCAGGAAAACCCUCAAAGUCGGGGGGCAACCC (SEQ ID No: 860), GGGUCAGGAGCCCCCCCCCUGCACCCAGGAAAACCCUCAAAGUCGGGGGGCAACCC (SEQ ID No: 861), GGGUCAGGAGCCCCCCCCCUGCACCCAGGAUAACCCUCAAAGUCGGGGGGCAACCC (SEQ ID No: 862), GUCAGGGUCAGGAGCCCCCCCCCUGAACCCAGGAAAACCCUCAAAGUCGGGGGGCAA CCC (SEQ ID No: 863), GUCAGGGUCAGGAGCCCCCCCCCUGCACCCAGGAAAACCCUCAAAGUCGGGGGGCAAC CC (SEQ ID No: 864), and GGGUCAGGAGCCCCCCCCCUGAACCCAGGAUAACCCUCAAAGUCGGGGGGC (SEQ ID No: 865), or a nucleotide sequence having at least 80%, 85%, 90%, 95%, 96%, 97%, 98%, or 99% sequence identity therewith. In some embodiments, the secondary structure comprises a nucleotide sequence of GGGUCAGGAGCCCCCCCCCUGAACCCAGGAUAACCCUCAAAGUCGGGGGGC (SEQ ID No: 865), or a nucleotide sequence having at least 80%, 85%, 90%, 95%, 96%, 97%, 98%, or 99% sequence identity therewith.

[0392] In some embodiments, the secondary structure comprises a quadruplex. In some embodiments, the secondary structure comprises a G-quadruplex. In some embodiments, the secondary structure comprises a nucleotide sequence selected from the group consisting of gq2(UGGUGGUGGUGGU) (SEQ ID No: 866), stk40(GGGACAGGGCAGGGACAGGG) (SEQ ID No: 867), apc2(GGGUCCGGGUCUGGGUCUGGG) (SEQ ID No: 868), stard3(GGGCAGGGUCUGGGCUGGG) (SEQ ID No: 869), tnsl(GGGCUGGGAUGGGAAAGGG) (SEQ ID No: 870), ceacam4(GGGCUCUGGGUGGGCCGGG) (SEQ ID No: 871), ercl(GGGCUGGGCUGGGCAGGG) (SEQ ID No: 872), pitpnm3(GGGUGGGCUGGGAAGGG) (SEQ ID No: 873), rlf(GGGAGGGAGGGCUAGGG) (SEQ ID No: 874), ube3c(GGGCAGGGCUGGGAGGG) (SEQ ID No: 875), taf15(GGGUGGGAGGGCUGGG) (SEQ ID No: 876), and xrnl(GCGUAACCUCCAUCCGAGUUGCAAGAGAGGGAAACGCAGUCUC) (SEQ ID No: 877), or a nucleotide sequence having at least 80%, 85%, 90%, 95%, 96%, 97%, 98%, or 99% sequence identity therewith.

[0393] In some embodiments, the secondary structure comprises aP4-P6 domain of a Group I intron. In some embodiments, the secondary structure comprises the nucleotide sequence of GGAAUUGCGGGAAAGGGGUCAACAGCCGUUCAGUACCAAGUCUCAGGGGAAACUUUG AGAUGGCCUUGCAAAGGGUAUGGUAAUAAGCUGACGGACAUGGUCCUAACCACGCAG CCAAGUCCUAAGUCAACAGAUCUUCUGUUGAUAUGGAUGCAGUUCA (SEQ ID No: 878), or a nucleotide sequence having at least 80%, 85%, 90%, 95%, 96%, 97%, 98%, or 99% sequence identity therewith.

[0394] In some embodiments, the secondary structure comprises a riboswitch aptamer. In some embodiments, the secondary structure comprises a riboswitch aptamer derived from a prequeosine-1 riboswitch aptamer. In some embodiments, the secondary structure comprises a modified prequeosine-1 riboswitch aptamer. In some embodiments, the secondary structure comprises a nucleotide sequence selected from the group consisting of UUGACGCGGUUCUAUCUAGUUACGCGUUAAACCAACUAGAAA (SEQ ID No: 879), UUGACGCGGUUCUAUCUACUUACGCGUUAAACCAACUAGAAA (SEQ ID No: 880), CGCGAGUCUAGGGGAUAACGCGUUAAACUUCCUAGAAGGCGGUU (SEQ ID No: 881), CGCGGAUCUAGAUUGUAACGCGUUAAACCAUCUAGAAGGCGGUU (SEQ ID No: 882), CGCGUCGCUACCGCCCGGCGCGUUAAACACACUAGAAGGCGGUU (SEQ ID No: 883), and CGCGGUUCUAUCUAGUUACGCGUUAAACCAACUAGAA (SEQ ID No: 885), or a nucleotide sequence having at least 80%, 85%, 90%, 95%, 96%, 97%, 98%, or 99% sequence identity therewith. In some embodiments, the secondary structure comprises a nucleotide sequence selected from the group consisting of UUGACGCGGUUCUAUCUAGUUACGCGUUAAACCAACUAGAAA (SEQ ID No: 879), CGCGAGUCUAGGGGAUAACGCGUUAAACUUCCUAGAAGGCGGUU (SEQ ID No: 881), CGCGGAUCUAGAUUGUAACGCGUUAAACCAUCUAGAAGGCGGUU (SEQ ID No: 882), CGCGUCGCUACCGCCCGGCGCGUUAAACACACUAGAAGGCGGUU (SEQ ID No: 883), and CGCGGUUCUAUCUAGUUACGCGUUAAACCAACUAGAA (SEQ ID No: 885), or a nucleotide sequence having at least 80%, 85%, 90%, 95%, 96%, 97%, 98%, or 99% sequence identity therewith. In some embodiments, the secondary structure comprises a nucleotide sequence of and CGCGGUUCUAUCUAGUUACGCGUUAAACCAACUAGAA (SEQ ID No: 885), or a nucleotide sequence having at least 80%, 85%, 90%, 95%, 96%, 97%, 98%, or 99% sequence identity therewith.

[0395] In some embodiments, the secondary structure is linked to one or more other component of a PEgRNA via a linker. For example, in some embodiments, the secondary structure is at the 3′ end of the PEgRNA and is linked to the 3′ end of a PBS via a linker. In some embodiments, the secondary structure is at the 5′ end of the PEgRNA and is linked to the 5′ end of a spacer via a linker. In some embodiments, the linker is a nucleotide linker that is 1, 2, 3, 4, 5, 6, 7, 8, 9, 10, 11, 12, 13, 14, 15, 16, 17, 18, 19, 20, 21, 22, 23, 24, 25, 26, 27, 28, 29, 30, 31, 32, 33, 34, 35, 36, 37, 38, 39, 40, 41, 42, 43, 44, 45, 46, 47, 48, 49, or 50 nucleotides in length. In some embodiments, the linker is 5 to 10 nucleotides in length. In some embodiments, the linker is 10 to 20 nucleotides in length. In some embodiments, the linker is 15 to 25 nucleotides in length. In some embodiments, the linker is 8 nucleotides in length.

[0396] In some embodiments, the linker is designed to minimize base pairing between the linker and another component of the PEgRNA. In some embodiments, the linker is designed to minimize base pairing between the linker and the spacer. In some embodiments, the linker is designed to minimize base pairing between the linker and the PBS. In some embodiments, the linker is designed to minimize base pairing between the linker and the editing template. In some embodiments, the linker is designed to minimize base pairing between the linker and the sequence of the RNA secondary structure. In some embodiments, the linker is optimized to minimize base pairing between the linker and another component of the PEgRNA, in order of the following priority: spacer, PBS, editing template and then scaffold. In some embodiments, base paring probability is calculated using ViennaRNA 2.0, as described in Lorenz, R. et al. ViennaRNA package 2.0. Algorithms Mol. Biol. 6, incorporated by reference in its entirety herein, under standard parameters (37° C., 1 M NaCl, 0.05 M MgCl2).

[0397] In some embodiments, the PEgRNA comprises a RNA secondary structure and/or a linker disclosed in Nelson et al. Engineered pegRNAs improve prime editing efficiency. Nat Biotechnol. (2021), the entirety of which is incorporated herein by reference.

[0398] In some embodiments, a PEgRNA is transcribed from a nucleotide encoding the PEgRNA, for example, a DNA plasmid encoding the PEgRNA. In some embodiments, the PEgRNA comprises a self-cleaving element. In some embodiments, the self-cleaving element improves transcription and/or processing of the PEgRNA when transcribed form the nucleotide encoding the PEgRNA. In some embodiments, the PEgRNA comprises a hairpin or a RNA quadruplex. In some embodiments, the PEgRNA comprises a self-cleaving ribozyme element, for example, a hammerhead, a pistol, a hatchet, a hairpin, a VS, a twister, or a twister sister ribozyme. In some embodiments, the PEgRNA comprises a HDV ribozyme. In some embodiments, the PEgRNA comprises a hairpin recognized by Csy4. In some embodiments, the PEgRNA comprises an ENE motif. In some embodiments, the PEgRNA comprises an element for nuclear expression (ENE) from MALAT1 lnc RNA. In some embodiments, the PEgRNA comprises an ENE element from Kaposi's sarcoma-associated herpesvirus (KSHV). In some embodiments, the PEgRNA comprises a 3′ box of a Ul snRNA. In some embodiments, the PEgRNA forms a circular RNA.

[0399] In some embodiments, the PEgRNA comprises an RNA secondary structure or a motif that improves binding to the DNA-RNA duple or enhances PEgRNA activity. In some embodiments, the PEgRNA comprises a sequence derived from a native nucleotide element involved in reverse transcription, e.g., initiation of retroviral transcription. In some embodiments, the PEgRNA comprises a sequence of, or derived from, a primer binding site of a substrate of a reverse transcriptase, a polypurine tract (PPT), or a kissing loop. In some embodiments, the PEgRNA comprises a dimerization motif, a kissing loop, or a GNRA tetraloop—tetraloop receptor pair that results in circularization of the PEgRNA. In some embodiments, the PEgRNA comprises an RNA secondary structure of a motif that results in physical separation of the spacer and the PBS of the PEgRNA, thereby prevents occlusion of the spacer and improves PEgRNA activity. In some embodiments, the PEgRNA comprises a secondary structure or motif, e.g., a 5′ or 3′ extension in the spacer region that form a toehold or hairpin, wherein the secondary structure or motif competes favorably against annealing between the spacer and the PBS of the PEgRNA, thereby prevents occlusion of the spacer and improves PEgRNA activity.

[0400] In some embodiments, a PEgRNA comprises the sequence GGCCGGCAUGGUCCCAGCCUCCUCGCUGGCGCCGGCUGGGCAACAUGCUUCGGCAUG GCGAAUGGGAC (SEQ ID No: 886) at the 3′ end. In some embodiments, a PEgRNA comprises the structure [spacer]-[gRNA core]-[editing template]-[PBS]-GGCCGGCAUGGUCCCAGCCUCCUCGCUGGCGCCGGCUGGGCAACAUGCUUCGGCAUG GCGAAUGGGAC (SEQ ID NO: 886), or [spacer]-[gRNA core]-[editing template]-[PBS]-GGCC GGCAUGGUCCCAGCCUCCUC GCUGGC GCC GGCUGGGCAACAUGCUUC GGCAUG GCGAAUGGGAC-(U)n (SEQ ID NO: 900), wherein n is an integer between 3 and 7. The structure derived from hepatitis D virus (HDV) is italicized.

[0401] In some embodiments, the PEgRNA comprises the sequence GGUGGGAGACGUCCCACC (SEQ ID No: 880) at the 5′ end and/or the sequence UGGGAGACGUCCCACC (SEQ ID NO: 901) at the 3′ end. In some embodiments, the PEgRNA comprises the following structure (M-MLV kissing loop): GGUGGGAGACGUCCCACC (SEQ ID NO: 880)-[spacer]-[gRNA core]-[editing template]-[PBS]-UGGGAGACGUCCCACC (SEQ ID NO: 901), or GGUGGGAGACGUCCCACC (SEQ ID NO: 880)-[spacer]-[gRNA core]-[editing template]-[PBS]-UGGGAGACGUCCCACC-(U)n (SEQ ID NO: 902), wherein n is an integer between 3 and 7. The kissing loop structure is italicized.

[0402] In some embodiments, the PEgRNA comprises the sequence GAGCAGCAUGGCGUCGCUGCUCAC (SEQ ID No: 888) at the 5′ end and/or the sequence CCAUCAGUUGACACCCUGAGG (SEQ ID No: 889) at the 3′ end. In some embodiments, the PEgRNA comprises the following structure (VS ribozyme kissing loop):

[0403] GAGCAGCAUGGCGUCGCUGCUCAC (SEQ ID NO: 888)-[spacer]-[gRNA core]-[editing template]-[PBS]- CCAUCAGUUGACACCCUGAGG (SEQ ID NO: 889s), or GAGCAGCAUGGCGUCGCUGCUCAC (SEQ ID NO: 888)-[spacer]-[gRNA core]-[editing template]-[PBS]- CCAUCAGUUGACACCCUGAGG-(U)n (SEQ ID NO: 903), wherein n is an integer between 3 and 7. (VS ribozyme kissing loop)

[0404] In some embodiments, the PEgRNA comprises the sequence GCAGACCUAAGUGGUGACAUAUGGUCUG (SEQ ID No: 890) at the 5′ end and/or the sequence CAUGCGAUUAGAAAUAAUCGCAUG (SEQ ID No: 891) at the 3′ end. In some embodiments, the PEgRNA comprises the following structure (tetraloop and receptor): GCAGACCUAAGUGGUGACAUAUGGUCUG (SEQ ID NO: 890)-[spacer]-[gRNA core]-[editing template]-[PBS]- CAUGCGAUUAGAAAUAAUCGCAUG (SEQ ID NO: 891), or GCAGACCUAAGUGGUGACAUAUGGUCUG (SEQ ID NO: 890)-[spacer]-[gRNA core]-[editing template]-[PBS]- CAUGCGAUUAGAAAUAAUCGCAUG-(U)n (SEQ ID NO: 904), wherein n is an integer between 3 and 7. The tetraloop/tetraloop receptor structure is italicized.

[0405] In some embodiments, the PEgRNA comprises the sequence GGCCGGCAUGGUCCCAGCCUCCUCGCUGGCGCCGGCUGGGCAACAUGCUUCGGCAUG GCGAAUGGGAC (SEQ ID No: 886) or UCUGCCAUCAAAGCUGCGACCGUGCUCAGUCUGGUGGGAGACGUCCCACCGGCCGGC AUGGUCCCAGCCUCCUCGCUGGCGCCGGCUGGGCAACAUGCUUCGGCAUGGCGAAUG GGAC (SEQ ID No: 892) at the 3′ end.

[0406] In some embodiments, a PEgRNA comprises a gRNA core that comprises a modified direct repeat compared to the sequence of a naturally occurring CRISPR-Cas guide RNA scaffold, for example, a Cas9 gRNA scaffold. In some embodiments, the PEgRNA comprises a “flip and extension (F+E)” gRNA core, wherein one or more base pairs in a direct repeat is modified. In some embodiments, the PEgRNA comprises a first direct repeat (the first paring element or the lower stem), wherein a Uracil is changed to a Adenine (such that in the stem region, a U-A base pair is changed to a A-U base pair). In some embodiments, the PEgRNA comprises a first direct repeat wherein the fourth U-A base pair in the stem is changed to a A-U base pair. In some embodiments, the PEgRNA comprises a first direct repeat wherein one or more U-A base pair is changed to a G-C or C-G base pair. For example, in some embodiments, the PEgRNA comprises a first direct repeat comprising a modification to a GUUUU-AAAAC pairing element, wherein one or more of the U-A base pairs is changed to a A-U base pair, a G-C base pair, or a C-G base pair. In some embodiments, the PEgRNA comprises an extended first direct repeat.

[0407] In some embodiments, a PEgRNA comprises a gRNA core comprises the sequence

(SEQ ID No: 893)
GUUUUAGAGCUAUACGUAGCAAGUUAAAAUAAGGCUAGUCCGUUAUCAA
CUUUACGAAGUGGCACCGAGUCGGUGC
or
(SEQ ID NO: 894)
GUUUUAGAGCUAUACGUAGCAAGUUAAAAUAAGGCUAGUCCGUUAUCAA
CUUUACGAAGUGGGACCGAGUCGGUCC.

[0408] In some embodiments, a PEgRNA comprises a gRNA core comprising the sequence

(SEQ ID NO: 895)
GUUUUAGAGCUAGCUCAUGAAAAUGAGCUAGCAAGUUAAAAUAAGGCUA
GUCCGUUAUCAACUUGAAAAAGUGGGACCGAGUCGGUCC.

[0409] In some embodiments, a PEgRNA comprises a gRNA core comprising the sequence

(SEQ ID NO: 896)
GUUUGAGAGCUAGAAAUAGCAAGUUUAAAUAAGGCUAGUCCGUUAUCAA
CUUGAAAAAGUGGGACCGAGUCGGUCC.

[0410] In some embodiments, a PEgRNA comprises a gRNA core comprising the sequence

[0411] GUUUAAGAGCUAGAAAUAGCAAGUUUAAAUAAGGCUAGUCCGUUAUCAACUUGA AAAAGUGGCACCGAGUCGGUGC (SEQ ID No: 897). In some embodiments, a PEgRNA comprise a gRNA core comprising the sequence

(SEQ ID NO: 898)
GUUUUAGAGCUAUGCUGGAAACAGCAUAGCAAGUUAAAAUAAGGCUAGU
CCGUUAUCAACUUGAAAAAGUGGCACCGAGUCGGUGC.

[0412] In some embodiments, a PEgRNA comprise a gRNA core comprising the sequence

(SEQ ID NO: 899)
GUUUAAGAGCUAUGCUGGAAACAGCAUAGCAAGUUUAAAUAAGGCUAGU
CCGUUAUCAACUUGAAAAAGUGGCACCG AGU CGGUGC.

[0413] A PEgRNA and/or an ngRNA of this disclosure, in some embodiments, may include modified nucleotides, e.g., chemically modified DNA or RNA nucleobases, and may include one or more nucleobase analogs (e.g., modifications which might add functionality, such as temperature resilience). In some embodiments, PEgRNAs and/or ngRNAs as described herein may be chemically modified. The phrase “chemical modifications,” as used herein, can include modifications which introduce chemistries which differ from those seen in naturally occurring DNA or RNAs, for example, covalent modifications such as the introduction of modified nucleotides, (e.g., nucleotide analogs, or the inclusion of pendant groups which are not naturally found in DNA or RNA molecules).

[0414] In some embodiments, the PEgRNAs provided in the disclosure may further comprise nucleotides added to the 5′ of the PEgRNAs. In some embodiments, the PEgRNA further comprises 1, 2, or 3 additional nucleotides added to the 5′ end. The additional nucleotides can be guanine, cytosine, adenine, or uracil. In some embodiments, the additional nucleotide at the 5′ end of the PEgRNA is a guanine or cytosine. In some embodiments, the additional nucleotides can be chemically or biologically modified.

[0415] In some embodiments, the PEgRNAs provided in the disclosure may further comprise nucleotides to the 3′ of the PEgRNAs. In some embodiments, the PEgRNA further comprises 1, 2, or 3 additional nucleotides to the 3′ end. The additional nucleotides can be guanine, cytosine, adenine, or uracil. In some embodiments, the additional nucleotides at the 3′ end of the PEgRNA is a polynucleotide comprising at least 1 uracil. In some embodiments, the additional nucleotides can be chemically or biologically modified.

[0416] In some embodiments, a PEgRNA or ngRNA is produced by transcription from a template nucleotide, for example, a template plasmid. In some embodiments, a polynucleotide encoding the PEgRNA or ngRNA is appended with one or more additional nucleotides that improves PEgRNA or ngRNA function or expression, e.g., expression from a plasmid that encodes the PEgRNA or ngRNA. In some embodiments, a polynucleotide encoding a PEgRNA or ngRNA is appended with one or more additional nucleotides at the 5′ end or at the 3′ end. In some embodiments, the polynucleotide encoding the PEgRNA or ngRNA is appended with a guanine at the 5′ end, for example, if the first nucleotide at the 5′ end of the spacer is not a guanine. In some embodiments, a polynucleotide encoding the PEgRNA or ngRNA is appended with nucleotide sequence CACC at the 5′ end. In some embodiments, the polynucleotide encoding the PEgRNA or ngRNA is appended with an additional nucleotide adenine at the 3′ end, for example, if the last nucleotide at the 3′ end of the PBS is a Thymine. In some embodiments, the polynucleotide encoding the PEgRNA or ngRNA is appended with additional nucleotide sequence TTTTTT (SEQ ID NO: 92445), TTTTTTT (SEQ ID NO: 92446), TTTTT (SEQ ID NO:), or TTTT (SEQ ID NO:) at the 3′ end. In some embodiments, the PEgRNA or ngRNA comprises the appended nucleotides from the transcription template. In some embodiments, the PEgRNA or ngRNA further comprises one or more nucleotides at the 5′ end or the 3′ end in addition to spacer, PBS, and RTT sequences. in some embodiments, the PEgRNA or ngRNA further comprises a guanine at the 5′ end, for example, when the first nucleotide at the 5′ end of the spacer is not a guanine. In some embodiments, the PEgRNA or ngRNA further comprises nucleotide sequence CACC at the 5′ end. In some embodiments, the PEgRNA or ngRNA further comprises an adenine at the 3′ end, for example, if the last nucleotide at the 3′ end of the PBS is a thymine. In some embodiments, the PEgRNA or ngRNA further comprises nucleotide sequence UUUUUUU (SEQ ID NO: 92448), UUUUUU (SEQ ID NO: 92447), UUUUU (SEQ ID NO:), or UUUU (SEQ ID NO:) at the 3′ end.

[0417] In some embodiments, the PEgRNAs and/or ngRNAs provided in this disclosure may have undergone a chemical or biological modification. Modifications may be made at any position within a PEgRNA or ngRNA and may include modification to a nucleobase or to a phosphate backbone of the PEgRNA or ngRNA. In some embodiments, chemical modifications can be structure guided modifications. In some embodiments, a chemical modification is at the 5′ end and/or the 3′ end of a PEgRNA. In some embodiments, a chemical modification is at the 5′ end and/or the 3′ end of a ngRNA. In some embodiments, a chemical modification can be within the spacer sequence, the extension arm, the editing template sequence, or the primer binding site of a PEgRNA. In some embodiments, a chemical modification may be within the spacer sequence or the gRNA core of a PEgRNA or a ngRNA. In some embodiments, a chemical modification can be within the 3′ most nucleotides of a PEgRNA or ngRNA. In some embodiments, a chemical modification can be within the 3′ most end of a PEgRNA or ngRNA comprises 1, 2, 3, 4, 5, 6, 7, 8, 9, 10 or more chemically modified nucleotides at the 3′ end. In some embodiments, a PEgRNA or ngRNA comprises 3 contiguous chemically modified nucleotides at the 3′ end. In some embodiments, a chemical modification can be within the 5′ most end of a PEgRNA or ngRNA. In some embodiments, a PEgRNA or ngRNA comprises 1, 2, 3, 4, 5, 6, 7, 8, 9, 10 or more chemically modified nucleotides at the 3′ end. In some embodiments, a PEgRNA or ngRNA comprises 1, 2, 3, 4, 5, 6, 7, 8, 9, 10 or more chemically modified nucleotides at the 5′ end. In some embodiments, a PEgRNA or ngRNA comprises 1, 2, 3, 4, or 5 or more chemically modified nucleotides at the 3′ end. In some embodiments, a PEgRNA or ngRNA comprises 1, 2, 3, 4, or 5 more chemically modified nucleotides at the 5′ end. In some embodiments, a PEgRNA or ngRNA comprises 1, 2, or 3 or more chemically modified nucleotides at the 3′ end. In some embodiments, a PEgRNA or ngRNA comprises 1, 2, or 3 more chemically modified nucleotides at the 5′ end. In some embodiments, a PEgRNA or ngRNA comprises 1, 2, 3, 4, 5, 6, 7, 8, 9, 10 or more contiguous chemically modified nucleotides at the 3′ end. In some embodiments, a PEgRNA or ngRNA comprises 1, 2, 3, 4, 5, 6, 7, 8, 9, 10 or more contiguous chemically modified nucleotides at the 5′ end. In some embodiments, a PEgRNA or ngRNA comprises 1, 2, 3, 4, or 5 contiguous chemically modified nucleotides at the 3′ end. In some embodiments, a PEgRNA or ngRNA comprises 1, 2, 3, 4, or 5 contiguous chemically modified nucleotides at the 5′ end. In some embodiments, a PEgRNA or ngRNA comprises 1, 2, or 3 contiguous chemically modified nucleotides at the 3′ end. In some embodiments, a PEgRNA or ngRNA comprises 1, 2, or 3 contiguous chemically modified nucleotides at the 5′ end. In some embodiments, a PEgRNA or ngRNA comprises 3 contiguous chemically modified nucleotides at the 3′ end. In some embodiments, a PEgRNA or ngRNA comprises 1, 2, 3, 4, 5, or more chemically modified nucleotides near the 3′ end. In some embodiments, a PEgRNA or ngRNA comprises 3 contiguous chemically modified nucleotides at the 3′ end. In some embodiments, a PEgRNA or ngRNA comprises 3 contiguous chemically modified nucleotides at the 5′ end. In some embodiments, a PEgRNA or ngRNA comprises 1, 2, 3, 4, 5, or more chemically modified nucleotides near the 3′ end. In some embodiments, a PEgRNA or ngRNA comprises 1, 2, 3, 4, 5, or more contiguous chemically modified nucleotides near the 3′ end. In some embodiments, a PEgRNA or ngRNA comprises 1, 2, 3, 4, 5, or more chemically modified nucleotides near the 3′ end, where the 3′ most nucleotide is not modified, and the 1, 2, 3, 4, 5, or more chemically modified nucleotides precede the 3′ most nucleotide in a 5′-to-3′ order. In some embodiments, a PEgRNA or ngRNA comprises 1, 2, 3, 4, 5, 6, 7, 8, 9, 10, 11, 12, 13, 14, 15, 16, 17, 18, 19, 20, 21, 22, 23, 24, 25, 26, 27, 28, 29, 30, 31, 32, 33, 34, 35 or more chemically modified nucleotides near the 3′ end, where the 3′ most nucleotide is not modified, and the 1, 2, 3, 4, 5, 6, 7, 8, 9, 10, 11, 12, 13, 14, 15, 16, 17, 18, 19, 20, 21, 22, 23, 24, 25, 26, 27, 28, 29, 30, 31, 32, 33, 34, 35 or more chemically modified nucleotides precede the 3′ most nucleotide in a 5′-to-3′ order.

[0418] In some embodiments, a PEgRNA or ngRNA comprises one or more chemical modified nucleotides in the gRNA core. The gRNA core of a PEgRNA may comprise one or more regions of a base paired lower stem, a base paired upper stem, where the lower stem and upper stem may be connected by a bulge comprising unpaired RNAs. The gRNA core may further comprise a nexus distal from the spacer sequence. In some embodiments, the gRNA core comprises one or more chemically modified nucleotides in the lower stem, upper stem, and/or the hairpin regions. In some embodiments, all of the nucleotides in the lower stem, upper stem, and/or the hairpin regions are chemically modified.

[0419] A chemical modification to a PEgRNA or ngRNA can comprise a 2′-O-thionocarbamate-protected nucleoside phosphoramidite, a 2′-O-methyl (M), a 2′-O-methyl 3′ phosphorothioate (MS), or a 2′-O-methyl 3′ thioPACE (MSP), or any combination thereof. In some embodiments, a chemically modified PEgRNA and/or ngRNA can comprise a′-O-methyl (M) RNA, a 2′-O-methyl 3′ phosphorothioate (MS) RNA, a 2′-O-methyl 3′ thioPACE (MSP) RNA, a 2′-F RNA, a phosphorothioate bond modification, any other chemical modifications known in the art, or any combination thereof. A chemical modification can also include, for example, the incorporation of non-nucleotide linkages or modified nucleotides into the PEgRNA and/or ngRNA (e.g., modifications to one or both of the 3′ and 5′ ends of a guide RNA molecule). Such modifications can include the addition of bases to an RNA sequence, complexing the RNA with an agent (e.g., a protein or a complementary nucleic acid molecule), and inclusion of elements which change the structure of an RNA molecule (e.g., which form secondary structures).

### Prime Editing Compositions

[0420] Disclosed herein, in some embodiments, are compositions, systems, and methods using a prime editing composition. The term “prime editing composition” or “prime editing system” refers to compositions involved in the method of prime editing as described herein. A prime editing composition may include a prime editor provided herein and a PEgRNA. A prime editing composition may further comprise additional elements, such as second strand nicking ngRNAs. Components of a prime editing composition may be combined to form a complex for prime editing, or may be kept separately, e.g., for administration purposes.

[0421] In some embodiments, a prime editing composition comprises a prime editor fusion protein complexed with a PEgRNA and optionally complexed with a ngRNA. In some embodiments, the prime editing composition comprises a prime editor comprising a DNA binding domain and a DNA polymerase domain associated with each other through a PEgRNA. For example, the prime editing composition may comprise a prime editor comprising a DNA binding domain and a DNA polymerase domain linked to each other by an RNA-protein recruitment aptamer RNA sequence, which is linked to a PEgRNA. In some embodiments, a prime editing composition comprises a PEgRNA and a polynucleotide, a polynucleotide construct, or a vector that encodes a prime editor fusion protein.

[0422] In some embodiments, a prime editing composition comprises a PEgRNA, a ngRNA, and a polynucleotide, a polynucleotide construct, or a vector that encodes a prime editor fusion protein. In some embodiments, a prime editing composition comprises multiple polynucleotides, polynucleotide constructs, or vectors, each of which encodes one or more prime editing composition components. In some embodiments, the PEgRNA of a prime editing composition is associated with the DNA binding domain, e.g., a Cas9 nickase, of the prime editor. In some embodiments, the PEgRNA of a prime editing composition complexes with the DNA binding domain of a prime editor and directs the prime editor to the target DNA.

[0423] In some embodiments, a prime editing composition comprises one or more polynucleotides that encode prime editor components and/or PEgRNA or ngRNAs. In some embodiments, a prime editing composition comprises a polynucleotide encoding a fusion protein comprising a DNA binding domain and a DNA polymerase domain. In some embodiments, a prime editing composition comprises (i) a polynucleotide encoding a fusion protein comprising a DNA binding domain and a DNA polymerase domain, and (ii) a PEgRNA or a polynucleotide encoding the PEgRNA. In some embodiments, a prime editing composition comprises (i) a polynucleotide encoding a fusion protein comprising a DNA binding domain and a DNA polymerase domain, (ii) a PEgRNA or a polynucleotide encoding the PEgRNA, and (iii) an ngRNA or a polynucleotide encoding the ngRNA. In some embodiments, a prime editing composition comprises (i) a polynucleotide encoding a DNA binding domain of a prime editor, e.g., a Cas9 nickase, (ii) a polynucleotide encoding a DNA polymerase domain of a prime editor, e.g., a reverse transcriptase, and (iii) a PEgRNA or a polynucleotide encoding the PEgRNA. In some embodiments, a prime editing composition comprises (i) a polynucleotide encoding a DNA binding domain of a prime editor, e.g., a Cas9 nickase, (ii) a polynucleotide encoding a DNA polymerase domain of a prime editor, e.g., a reverse transcriptase, (iii) a PEgRNA or a polynucleotide encoding the PEgRNA, and (iv) an ngRNA or a polynucleotide encoding the ngRNA.

[0424] In some embodiments, the polynucleotide encoding the DNA biding domain or the polynucleotide encoding the DNA polymerase domain further encodes an additional polypeptide domain, e.g., an RNA-protein recruitment domain, such as a MS2 coat protein domain. In some embodiments, a prime editing composition comprises (i) a polynucleotide encoding a N-terminal half of a prime editor fusion protein and an intein-N and (ii) a polynucleotide encoding a C-terminal half of a prime editor fusion protein and an intein-C. In some embodiments, a prime editing composition comprises (i) a polynucleotide encoding a N-terminal half of a prime editor fusion protein and an intein-N(ii) a polynucleotide encoding a C-terminal half of a prime editor fusion protein and an intein-C, (iii) a PEgRNA or a polynucleotide encoding the PEgRNA, and/or (iv) an ngRNA or a polynucleotide encoding the ngRNA. In some embodiments, a prime editing composition comprises (i) a polynucleotide encoding a N-terminal portion of a DNA binding domain and an intein-N, (ii) a polynucleotide encoding a C-terminal portion of the DNA binding domain, an intein-C, and a DNA polymerase domain. In some embodiments, the DNA binding domain is a Cas protein domain, e.g., a Cas9 nickase. In some embodiments, the prime editing composition comprises (i) a polynucleotide encoding a N-terminal portion of a DNA binding domain and an intein-N, (ii) a polynucleotide encoding a C-terminal portion of the DNA binding domain, an intein-C, and a DNA polymerase domain, (iii) a PEgRNA or a polynucleotide encoding the PEgRNA, and/or (iv) a ngRNA or a polynucleotide encoding the ngRNA.

[0425] In some embodiments, a prime editing system comprises one or more polynucleotides encoding one or more prime editor polypeptides, wherein activity of the prime editing system may be temporally regulated by controlling the timing in which the vectors are delivered. For example, in some embodiments, a polynucleotide encoding the prime editor and a polynucleotide encoding a PEgRNA may be delivered simultaneously. For example, in some embodiments, a polynucleotide encoding the prime editor and a polynucleotide encoding a PEgRNA may be delivered sequentially.

[0426] In some embodiments, a polynucleotide encoding a component of a prime editing system may further comprise an element that is capable of modifying the intracellular half-life of the polynucleotide and/or modulating translational control. In some embodiments, the polynucleotide is a RNA, for example, an mRNA. In some embodiments, the half-life of the polynucleotide, e.g., the RNA may be increased. In some embodiments, the half-life of the polynucleotide, e.g., the RNA may be decreased. In some embodiments, the element may be capable of increasing the stability of the polynucleotide, e.g., the RNA. In some embodiments, the element may be capable of decreasing the stability of the polynucleotide, e.g., the RNA. In some embodiments, the element may be within the 3′ UTR of the RNA. In some embodiments, the element may include a polyadenylation signal (PA). In some embodiments, the element may include a cap, e.g., an upstream mRNA or PEgRNA end. In some embodiments, the RNA may comprise no PA such that it is subject to quicker degradation in the cell after transcription.

[0427] In some embodiments, the element may include at least one AU-rich element (ARE). The AREs may be bound by ARE binding proteins (ARE-BPs) in a manner that is dependent upon tissue type, cell type, timing, cellular localization, and environment. In some embodiments the destabilizing element may promote RNA decay, affect RNA stability, or activate translation. In some embodiments, the ARE may comprise 50 to 150 nucleotides in length. In some embodiments, the ARE may comprise at least one copy of the sequence AUUUA. In some embodiments, at least one ARE may be added to the 3′ UTR of the RNA. In some embodiments, the element may be a Woodchuck Hepatitis Virus Posttranscriptional Regulatory Element (WPRE). In further embodiments, the element is a modified and/or truncated WPRE sequence that is capable of enhancing expression from the transcript. In some embodiments, the WPRE or equivalent may be added to the 3′ UTR of the RNA. In some embodiments, the element may be selected from other RNA sequence motifs that are enriched in either fast- or slow-decaying transcripts. In some embodiments, the polynucleotide, e.g., a vector, encoding the PE or the PEgRNA may be self-destroyed via cleavage of a target sequence present on the polynucleotide, e.g., a vector. The cleavage may prevent continued transcription of a PE or a PEgRNA.

[0428] Polynucleotides encoding prime editing composition components can be DNA, RNA, or any combination thereof. In some embodiments, a polynucleotide encoding a prime editing composition component is an expression construct. In some embodiments, a polynucleotide encoding a prime editing composition component is a vector. In some embodiments, the vector is a DNA vector. In some embodiments, the vector is a plasmid. In some embodiments, the vector is a virus vector, e.g., a retroviral vector, adenoviral vector, lentiviral vector, herpesvirus vector, or an adeno-associated virus vector (AAV).

[0429] In some embodiments, polynucleotides encoding polypeptide components of a prime editing composition are codon optimized by replacing at least one codon (e.g., about or more than about 1, 2, 3, 4, 5, 10, 15, 20, 25, 50, or more codons) of the native sequence with codons that are more frequently or most frequently used in the genes of that host cell while maintaining the native amino acid sequence. In some embodiments, a polynucleotide encoding a polypeptide component of a prime editing composition are operably linked to one or more expression regulatory elements, for example, a promoter, a 3′ UTR, a 5′ UTR, or any combination thereof. In some embodiments, a polynucleotide encoding a prime editing composition component is a messenger RNA (mRNA). In some embodiments, the mRNA comprises a Cap at the 5′ end and/or a poly A tail at the 3′ end.

### Pharmaceutical Compositions

[0430] Other aspects of the present disclosure relate to pharmaceutical compositions comprising any of the prime editors, fusion proteins, polynucleotides encoding prime editor polypeptides, PEgRNAs, ngRNAs, prime editing complexes, and/or the fusion protein-guide polynucleotide complexes described herein. The term “pharmaceutical composition,” as used herein, refers to a composition formulated for pharmaceutical use. In some embodiments, the pharmaceutical composition further comprises a pharmaceutically acceptable carrier. In some embodiments, the pharmaceutical composition comprises additional agents (e.g., for specific delivery, increasing half-life, or other therapeutic compounds). As used here, the term “pharmaceutically-acceptable carrier” means a pharmaceutically acceptable material, composition or vehicle, such as a liquid or solid filler, diluent, excipient, manufacturing aid (e.g., lubricant, talc magnesium, calcium or zinc stearate, or steric acid), or solvent encapsulating material, involved in carrying or transporting the compound from one site (e.g., the delivery site) of the body, to another site (e.g., organ, tissue or portion of the body). A pharmaceutically acceptable carrier is “acceptable” in the sense of being compatible with the other ingredients of the formulation and not injurious to the tissue of the subject (e.g., physiologically compatible, sterile, physiologic pH, etc.).

[0431] Some examples of materials which can serve as pharmaceutically-acceptable carriers include: (1) sugars, such as lactose, glucose and sucrose; (2) starches, such as corn starch and potato starch; (3) cellulose, and its derivatives, such as sodium carboxymethyl cellulose, methylcellulose, ethyl cellulose, microcrystalline cellulose and cellulose acetate; (4) powdered tragacanthin; (5) malt; (6) gelatin; (7) lubricating agents, such as magnesium stearate, sodium lauryl sulfate and talc; (8) excipients, such as cocoa butter and suppository waxes; (9) oils, such as peanut oil, cottonseed oil, safflower oil, sesame oil, olive oil, corn oil and soybean oil; (10) glycols, such as propylene glycol; (11) polyols, such as glycerin, sorbitol, mannitol and polyethylene glycol (PEG); (12) esters, such as ethyl oleate and ethyl laurate; (13) agar; (14) buffering agents, such as magnesium hydroxide and aluminum hydroxide; (15) alginic acid; (16) pyrogen-free water; (17) isotonic saline; (18) Ringer's solution; (19) ethyl alcohol; (20) pH buffered solutions; (21) polyesters, polycarbonates and/or polyanhydrides; (22) bulking agents, such as polypeptides and amino acids (23) serum alcohols, such as ethanol; and (23) other non-toxic compatible substances employed in pharmaceutical formulations. Wetting agents, coloring agents, release agents, coating agents, sweetening agents, flavoring agents, perfuming agents, preservative and antioxidants can also be present in the formulation. The terms such as “excipient”, “carrier,” “pharmaceutically acceptable carrier” or the like are used interchangeably herein.

[0432] Pharmaceutical compositions can comprise one or more pH buffering compounds to maintain the pH of the formulation at a predetermined level that reflects physiological pH, such as in the range of about 5.0 to about 8.0. The pH buffering compound used in the aqueous liquid formulation can be an amino acid or mixture of amino acids, such as histidine or a mixture of amino acids such as histidine and glycine. Alternatively, the pH buffering compound is preferably an agent which maintains the pH of the formulation at a predetermined level, such as in the range of about 5.0 to about 8.0, and which does not chelate calcium ions. Illustrative examples of such pH buffering compounds include, but are not limited to, imidazole and acetate ions. The pH buffering compound may be present in any amount suitable to maintain the pH of the formulation at a predetermined level.

[0433] Pharmaceutical compositions can also contain one or more osmotic modulating agents, i.e., a compound that modulates the osmotic properties (e.g., tonicity, osmolality, and/or osmotic pressure) of the formulation to a level that is acceptable to the blood stream and blood cells of recipient individuals. The osmotic modulating agent can be an agent that does not chelate calcium ions. The osmotic modulating agent can be any compound known or available to those skilled in the art that modulates the osmotic properties of the formulation. One skilled in the art may empirically determine the suitability of a given osmotic modulating agent for use in the inventive formulation. Illustrative examples of suitable types of osmotic modulating agents include, but are not limited to, salts, such as sodium chloride and sodium acetate; sugars, such as sucrose, dextrose, and mannitol; amino acids, such as glycine; and mixtures of one or more of these agents and/or types of agents. The osmotic modulating agent(s) may be present in any concentration sufficient to modulate the osmotic properties of the formulation.

[0434] The pharmaceutical composition comprising any of the prime editors, fusion proteins, polynucleotides encoding prime editor polypeptides, PEgRNAs, ngRNAs, prime editing complexes, and/or the fusion protein-guide polynucleotide complexes described herein may be used in vitro or in vivo. In some embodiments, the pharmaceutical composition or any components thereof are delivered to cells (e.g., mammalian cells, e.g., human cells), e.g., in vitro or in vivo. In some embodiments, the pharmaceutical composition is formulated for delivery to a subject, e.g., for prime editing. Suitable routes of administrating the pharmaceutical composition described herein include, without limitation: topical, subcutaneous, transdermal, intradermal, intralesional, intraarticular, intraperitoneal, intravesical, transmucosal, gingival, intradental, intracochlear, transtympanic, intraorgan, epidural, intrathecal, intramuscular, intravenous, intravascular, intraosseus, periocular, intratumoral, intracerebral, and intracerebroventricular administration. In some embodiments, the pharmaceutical composition described herein is administered locally to a diseased site (e.g., tumor site). In some embodiments, the pharmaceutical composition described herein is administered to a subject by injection, by means of a catheter, by means of a suppository, or by means of an implant, the implant being of a porous, non-porous, or gelatinous material, including a membrane, such as a sialastic membrane, or a fiber. In other embodiments, the pharmaceutical composition described herein is delivered in a controlled release system. In some embodiments, a pump can be used. In some embodiments, polymeric materials can be used. In some embodiments, the pharmaceutical composition is formulated in accordance with routine procedures as a composition adapted for intravenous or subcutaneous administration to a subject, e.g., a human. In some embodiments, pharmaceutical composition for administration by injection are solutions in sterile isotonic use as solubilizing agent and a local anesthetic such as lignocaine to ease pain at the site of the injection. Generally, the ingredients are supplied either separately or mixed together in unit dosage form, for example, as a dry lyophilized powder or water free concentrate in a hermetically sealed container such as an ampoule or sachette indicating the quantity of active agent. Where the pharmaceutical is to be administered by infusion, it can be dispensed with an infusion bottle containing sterile pharmaceutical grade water or saline. Where the pharmaceutical composition is administered by injection, an ampoule of sterile water for injection or saline can be provided so that the ingredients can be mixed prior to administration.

[0435] A pharmaceutical composition for systemic administration can be a liquid, e.g., sterile saline, lactated Ringer's or Hank's solution. In addition, the pharmaceutical composition can be in solid forms and re-dissolved or suspended immediately prior to use. Lyophilized forms are also contemplated. The pharmaceutical composition can be contained within a lipid particle or vesicle, such as a liposome or microcrystal, which is also suitable for parenteral administration. The particles can be of any suitable structure, such as unilamellar or plurilamellar, so long as compositions are contained therein. Compounds can be entrapped in“stabilized plasmid-lipid particles” (SPLP) containing the fusogenic lipid dioleoylphosphatidylethanolamine (DOPE), low levels (5-10 mol %) of cationic lipid, and stabilized by a polyethyleneglycol (PEG) coating. Positively charged lipids such as N-[1-(2,3-dioleoyloxi)propyl]-N,N,N-trimethyl-amoniummethylsulfate, or “DOTAP,” are particularly preferred for such particles and vesicles.

[0436] The pharmaceutical composition described herein can be administered or packaged as a unit dose, for example, in reference to a pharmaceutical composition to physically discrete units suitable as unitary dosage for the subject, each unit containing a predetermined quantity of active material calculated to produce the desired therapeutic effect in association with the required diluent, i.e., carrier, or vehicle. Further, the pharmaceutical composition can be provided as a pharmaceutical kit comprising (a) a container containing a compound of the invention in lyophilized form and (b) a second container containing a pharmaceutically acceptable diluent (e.g., sterile used for reconstitution or dilution of the lyophilized compound of the invention. Optionally associated with such container(s) can be a notice in the form prescribed by a governmental agency regulating the manufacture, use or sale of pharmaceuticals or biological products, which notice reflects approval by the agency of manufacture, use or sale for human administration.

[0437] Any of the prime editors, fusion proteins, PEgRNAs, and/or complexes described herein are provided as part of a pharmaceutical composition. In some embodiments, the pharmaceutical composition comprises any of the prime editors or fusion proteins provided herein. In some embodiments, the pharmaceutical composition comprises any of the complexes provided herein. In some embodiments, the pharmaceutical composition comprises a ribonucleoprotein complex comprising a prime editor that forms a complex with a PEgRNA and a cationic lipid. In some embodiments pharmaceutical composition comprises a gRNA, a nucleic acid programmable DNA binding protein, a cationic lipid, and a pharmaceutically acceptable excipient. Pharmaceutical compositions can optionally comprise one or more additional therapeutically active substances.

[0438] Subjects to which administration of the pharmaceutical compositions is contemplated include, but are not limited to, humans and/or other primates; mammals, domesticated animals, pets, and commercially relevant mammals such as cattle, pigs, horses, sheep, cats, dogs, mice, and/or rats; and/or birds, including commercially relevant birds such as chickens, ducks, geese, and/or turkeys.

[0439] Formulations of the pharmaceutical compositions described herein can be prepared by any method known or hereafter developed in the art of pharmacology. In general, such preparatory methods include the step of bringing the active ingredient(s) into association with an excipient and/or one or more other accessory ingredients, and then, if necessary and/or desirable, shaping and/or packaging the product into a desired single- or multi-dose unit. Pharmaceutical formulations can additionally comprise a pharmaceutically acceptable excipient, which, as used herein, includes any and all solvents, dispersion media, diluents, or other liquid vehicles, dispersion or suspension aids, surface active agents, isotonic agents, thickening or emulsifying agents, preservatives, solid binders, lubricants and the like, as suited to the particular dosage form desired.

[0440] The compositions, as described above, can be administered in effective amounts. The effective amount will depend upon the mode of administration, the particular condition being treated, and the desired outcome. It may also depend upon the stage of the condition, the age and physical condition of the subject, the nature of concurrent therapy, if any, and like factors well-known to the medical practitioner. For therapeutic applications, it is that amount sufficient to achieve a medically desirable result.

### Methods of Editing

[0441] The methods and compositions disclosed herein can be used to edit a target gene of interest by prime editing. In some embodiments, the prime editing method comprises contacting a target gene, with a PEgRNA and a prime editor (PE) polypeptide described herein. In some embodiments, the target gene is double stranded, and comprises two strands of DNA complementary to each other. In some embodiments, the contacting with a PEgRNA and the contacting with a prime editor are performed sequentially. In some embodiments, the contacting with a prime editor is performed after the contacting with a PEgRNA. In some embodiments, the contacting with a PEgRNA is performed after the contacting with a prime editor. In some embodiments, the contacting with a PEgRNA, and the contacting with a prime editor are performed simultaneously. In some embodiments, the PEgRNA and the prime editor are associated in a complex prior to contacting a target gene.

[0442] In some embodiments, contacting the target gene with the prime editing composition results in binding of the PEgRNA to a target strand of the target gene. In some embodiments, contacting the target gene with the prime editing composition results in binding of the PEgRNA to a search target sequence on the target strand of the target gene upon contacting with the PEgRNA. In some embodiments, contacting the target gene with the prime editing composition results in binding of a spacer sequence of the PEgRNA to a search target sequence with the search target sequence on the target strand of the target gene upon said contacting of the PEgRNA.

[0443] In some embodiments, contacting the target gene with the prime editing composition results in binding of the prime editor to the target gene, upon the contacting of the PE composition with the target gene. In some embodiments, the DNA binding domain of the PE associates with the PEgRNA. In some embodiments, the PE binds the target gene, directed by the PEgRNA. Accordingly, in some embodiments, the contacting of the target gene result in binding of a DNA binding domain of a prime editor of the target gene directed by the PEgRNA.

[0444] In some embodiments, contacting the target gene with the prime editing composition results in a nick in an edit strand of the target gene by the prime editor upon contacting with the target gene, thereby generating a nicked on the edit strand of the target gene. In some embodiments, contacting the target gene with the prime editing composition results in a single-stranded DNA comprising a free 3′ end at the nick site of the edit strand of the target gene. In some embodiments, contacting the target gene with the prime editing composition results in a nick in the edit strand of the target gene by a DNA binding domain of the prime editor, thereby generating a single-stranded DNA comprising a free 3′ end at the nick site. In some embodiments, the DNA binding domain of the prime editor is a Cas domain. In some embodiments, the DNA binding domain of the prime editor is a Cas9. In some embodiments, the DNA binding domain of the prime editor is a Cas9 nickase.

[0445] In some embodiments, contacting the target gene with the prime editing composition results in hybridization of the PEgRNA with the 3′ end of the nicked single-stranded DNA, thereby priming DNA polymerization by a DNA polymerase domain of the prime editor. In some embodiments, the free 3′ end of the single-stranded DNA generated at the nick site hybridizes to a primer binding site sequence (PBS) of the contacted PEgRNA, thereby priming DNA polymerization. In some embodiments, the DNA polymerization is reverse transcription catalyzed by a reverse transcriptase domain of the prime editor. In some embodiments, the method comprises contacting the target gene with a DNA polymerase, e.g., a reverse transcriptase, as a part of a prime editor fusion protein or prime editing complex (in cis), or as a separate protein (in trans).

[0446] In some embodiments, contacting the target gene with the prime editing composition generates an edited single stranded DNA that is coded by the editing template of the PEgRNA by DNA polymerase mediated polymerization from the 3′ free end of the single-stranded DNA at the nick site. In some embodiments, the editing template of the PEgRNA comprises one or more intended nucleotide edits compared to endogenous sequence of the target gene. In some embodiments, the intended nucleotide edits are incorporated in the target gene, by excision of the 5′ single stranded DNA of the edit strand of the target gene generated at the nick site and DNA repair. In some embodiments, the intended nucleotide edits are incorporated in the target gene by excision of the editing target sequence and DNA repair. In some embodiments, excision of the 5′ single stranded DNA of the edit strand generated at the nick site is by a flap endonuclease. In some embodiments, the flap nuclease is FEN1. In some embodiments, the method further comprises contacting the target gene with a flap endonuclease. In some embodiments, the flap endonuclease is provided as a part of a prime editor fusion protein. In some embodiments, the flap endonuclease is provided in trans.

[0447] In some embodiments, contacting the target gene with the prime editing composition generates a mismatched heteroduplex comprising the edit strand of the target gene that comprises the edited single stranded DNA, and the unedited target strand of the target gene. Without being bound by theory, the endogenous DNA repair and replication may resolve the mismatched edited DNA to incorporate the nucleotide change(s) to form the desired edited target gene.

[0448] In some embodiments, the method further comprises contacting the target gene, with a nick guide (ngRNA) disclosed herein. In some embodiments, the ngRNA comprises a spacer that binds a second search target sequence on the edit strand of the target gene. In some embodiments, the contacted ngRNA directs the PE to introduce a nick in the target strand of the target gene. In some embodiments, the nick on the target strand (non-edit strand) results in endogenous DNA repair machinery to use the edit strand to repair the non-edit strand, thereby incorporating the intended nucleotide edit in both strand of the target gene and modifying the target gene. In some embodiments, the ngRNA comprises a spacer sequence that is complementary to, and may hybridize with, the second search target sequence on the edit strand only after the intended nucleotide edit(s) are incorporated in the edit strand of the target gene.

[0449] In some embodiments, the target gene is contacted by the ngRNA, the PEgRNA, and the PE simultaneously. In some embodiments, the ngRNA, the PEgRNA, and the PE form a complex when they contact the target gene. In some embodiments, the target gene is contacted with the ngRNA, the PEgRNA, and the prime editor sequentially. In some embodiments, the target gene is contacted with the ngRNA and/or the PEgRNA after contacting the target gene with the PE. In some embodiments, the target gene is contacted with the ngRNA and/or the PEgRNA before contacting the target gene with the prime editor.

[0450] In some embodiments, the target gene, is in a cell. Accordingly, also provided herein are methods of modifying a cell. Accordingly, also provided herein are methods of modifying a cell, such as a human cell, a human primary cell, a human iPSC-derived cell, and human HSPC.

[0451] In some embodiments, the prime editing method comprises introducing a PEgRNA, a prime editor, and/or a ngRNA into the cell that has the target gene. In some embodiments, the prime editing method comprises introducing into the cell that has the target gene with a prime editing composition comprising a PEgRNA, a prime editor polypeptide, and/or a ngRNA. In some embodiments, the PEgRNA, the prime editor polypeptide, and/or the ngRNA form a complex prior to the introduction into the cell. In some embodiments, the PEgRNA, the prime editor polypeptide, and/or the ngRNA form a complex after the introduction into the cell. The prime editors, PEgRNA and/or ngRNAs, and prime editing complexes may be introduced into the cell by any delivery approaches described herein or any delivery approach known in the art, including ribonucleoprotein (RNPs), lipid nanoparticles (LNPs), viral vectors, non-viral vectors, mRNA delivery, and physical techniques such as cell membrane disruption by a microfluidics device. The prime editors, PEgRNA and/or ngRNAs, and prime editing complexes may be introduced into the cell simultaneously or sequentially.

[0452] In some embodiments, the prime editing method comprises introducing into the cell a PEgRNA or a polynucleotide encoding the PEgRNA, a prime editor polynucleotide encoding a prime editor polypeptide, and optionally an ngRNA or a polynucleotide encoding the ngRNA. In some embodiments, the method comprises introducing the PEgRNA or the polynucleotide encoding the PEgRNA, the polynucleotide encoding the prime editor polypeptide, and/or the ngRNA or the polynucleotide encoding the ngRNA into the cell simultaneously. In some embodiments, the method comprises introducing the PEgRNA or the polynucleotide encoding the PEgRNA, the polynucleotide encoding the prime editor polypeptide, and/or the ngRNA or the polynucleotide encoding the ngRNA into the cell sequentially. In some embodiments, the method comprises introducing the polynucleotide encoding the prime editor polypeptide into the cell before introduction of the PEgRNA or the polynucleotide encoding the PEgRNA and/or the ngRNA or the polynucleotide encoding the ngRNA. In some embodiments, the polynucleotide encoding the prime editor polypeptide is introduced into and expressed in the cell before introduction of the PEgRNA or the polynucleotide encoding the PEgRNA and/or the ngRNA or the polynucleotide encoding the ngRNA into the cell. In some embodiments, the polynucleotide encoding the prime editor polypeptide is introduced into the cell after the PEgRNA or the polynucleotide encoding the PEgRNA and/or the ngRNA or the polynucleotide encoding the ngRNA are introduced into the cell. The polynucleotide encoding the prime editor polypeptide, the PEgRNA or the polynucleotide encoding the PEgRNA, and/or the ngRNA or the polynucleotide encoding the ngRNA, may be introduced into the cell by any delivery approaches described herein or any delivery approach known in the art, for example, by RNPs, LNPs, viral vectors, non-viral vectors, mRNA delivery, and physical delivery.

[0453] In some embodiments, the polynucleotide encoding the prime editor polypeptide, the polynucleotide encoding the PEgRNA, and/or the polynucleotide encoding the ngRNA integrate into the genome of the cell after being introduced into the cell. In some embodiments, the polynucleotide encoding the prime editor polypeptide, the polynucleotide encoding the PEgRNA, and/or the polynucleotide encoding the ngRNA are introduced into the cell for transient expression. Accordingly, also provided herein are cells modified by prime editing.

[0454] In some embodiments, the cell is a prokaryotic cell. In some embodiments, the cell is a eukaryotic cell. In some embodiments, the cell is a mammalian cell. In some embodiments, the cell is a non-human primate cell, bovine cell, porcine cell, rodent or mouse cell. In some embodiments, the cell is a human cell.

[0455] In some embodiments, the cell is a primary cell. In some embodiments, the cell is a human primary cell. In some embodiments, the cell is a progenitor cell. In some embodiments, the cell is a human progenitor cell. In some embodiments, the cell is a human cell from an organ. In some embodiments, the cell is a primary human cell derived from an induced human pluripotent stem cell (iPSC). In some embodiments, the cell is a hepatocyte. In some embodiments, the cell is a human HSPC. In some embodiments, the cell is a progenitor cell. In some embodiments, the cell is a stem cell. in some embodiments, the cell is an induced pluripotent stem cell. In some embodiments, the cell is an embryonic stem cell. In some embodiments, the cell is a hematopoietic progenitor cell. In some embodiments, the cell is a hematopoietic stem cell. In some embodiments, the cell is a hematopoietic stem or progenitor cell (HSPC). In some embodiments, the cell is a fibroblast. In some embodiments, the cell is a CD34+ cell. In some embodiments, the cell is a hematopoietic stem cell (HSC). In some embodiments, the cell is a hematopoietic progenitor cell (HPC). In some embodiments, the cell is a human HSPC. In some embodiments, the cell is a human HPC. In some embodiments, the cell is a human HSC. In some embodiments, the cell is a long term (LT)-HSC. In some embodiments, the cell is a short-term(ST)-HSC. In some embodiments, the cell is a myeloid progenitor cell. In some embodiments, the cell is a lymphoid progenitor cell. In some embodiments, the cell is a granulocyte monocyte progenitor cell. In some embodiments, the cell is a megakaryocyte erythroid progenitor cell.

[0456] In some embodiments, the cell is a human progenitor cell. In some embodiments, the cell is a human stem cell. in some embodiments, the cell is an induced human pluripotent stem cell. In some embodiments, the cell is a human embryonic stem cell. In some embodiments, the cell is a human fibroblast. In some embodiments, the cell is a primary cell. In some embodiments, the cell is a human primary cell. In some embodiments, the cell is a differentiated cell. In some embodiments, the cell edited by prime editing can be differentiated into or give rise to recovery of a population of cells, e.g., neutrophils, platelets, red blood cells, monocytes, macrophages, antigen-presenting cells, microglia, osteoclasts, dendritic cells, inner ear cell, inner ear support cell, cochlear cell and/or lymphocytes.

[0457] In some embodiments, the target gene edited by prime editing is in a chromosome of the cell. In some embodiments, the intended nucleotide edits incorporate in the chromosome of the cell and are inheritable by progeny cells. In some embodiments, the intended nucleotide edits introduced to the cell by the prime editing compositions and methods are such that the cell and progeny of the cell also include the intended nucleotide edits. In some embodiments, the cell is autologous, allogeneic, or xenogeneic to a subject. In some embodiments, the cell is from or derived from a subject. In some embodiments, the cell is from or derived from a human subject. In some embodiments, the cell is introduced back into the subject, e.g., a human subject, after incorporation of the intended nucleotide edits by prime editing.

[0458] In some embodiments, the method provided herein comprises introducing the prime editor polypeptide or the polynucleotide encoding the prime editor polypeptide, the PEgRNA or the polynucleotide encoding the PEgRNA, and/or the ngRNA or the polynucleotide encoding the ngRNA into a plurality or a population of cells that comprise the target gene. In some embodiments, the population of cells is of the same cell type. In some embodiments, the population of cells is of the same tissue or organ. In some embodiments, the population of cells is heterogeneous. In some embodiments, the population of cells is homogeneous. In some embodiments, the population of cells is from a single tissue or organ, and the cells are heterogeneous. In some embodiments, the introduction into the population of cells is ex vivo. In some embodiments, the introduction into the population of cells is in vivo, e.g., into a human subject.

[0459] In some embodiments, the target gene is in a genome of each cell of the population. In some embodiments, introduction of the prime editor polypeptide or the polynucleotide encoding the prime editor polypeptide, the PEgRNA or the polynucleotide encoding the PEgRNA, and/or the ngRNA or the polynucleotide encoding the ngRNA results in incorporation of one or more intended nucleotide edits in the target gene in at least one of the cells in the population of cells. In some embodiments, introduction of the prime editor polypeptide or the polynucleotide encoding the prime editor polypeptide, the PEgRNA or the polynucleotide encoding the PEgRNA, and/or the ngRNA or the polynucleotide encoding the ngRNA results in incorporation of the one or more intended nucleotide edits in the target gene in a plurality of the population of cells. In some embodiments, introduction of the prime editor polypeptide or the polynucleotide encoding the prime editor polypeptide, the PEgRNA or the polynucleotide encoding the PEgRNA, and/or the ngRNA or the polynucleotide encoding the ngRNA results in incorporation of the one or more intended nucleotide edits in the target gene in each cell of the population of cells. In some embodiments, introduction of the prime editor polypeptide or the polynucleotide encoding the prime editor polypeptide, the PEgRNA or the polynucleotide encoding the PEgRNA, and/or the ngRNA or the polynucleotide encoding the ngRNA results in incorporation of the one or more intended nucleotide edits in the target gene in sufficient number of cells such that the disease or disorder is treated, prevented or ameliorated.

[0460] In some embodiments, editing efficiency of the prime editing compositions and method described herein can be measured by calculating the percentage of edited target genes in a population of cells introduced with the prime editing composition. In some embodiments, the editing efficiency is determined after 1 hour, 2 hours, 6 hours, 12 hours, 24 hours, 36 hours, 48 hours, 3 days, 4 days, 5 days, 7 days, 10 days, or 14 days of exposing a target gene (e.g., a target gene within the genome of a cell) to a prime editing composition. In some embodiments, the population of cells introduced with the prime editing composition is ex vivo. In some embodiments, the population of cells introduced with the prime editing composition is in vitro. In some embodiments, the population of cells introduced with the prime editing composition is in vivo. In some embodiments, the prime editing methods disclosed herein have an editing efficiency of at least about 1%, at least about 5%, at least about 10%, at least about 20%, at least about 30%, at least about 40%, at least about 50%, at least about 60%, at least about 70%, at least about 80%, at least about 90%, at least about 95%, or at least about 99% relative to a suitable control. In some embodiments, the prime editing methods disclosed herein have an editing efficiency of at least 25% relative to a suitable control. In some embodiments, the prime editing methods disclosed herein have an editing efficiency of at least 35% relative to a suitable control. Prime editing methods disclosed herein has an editing efficiency of at least 30% relative to a suitable control. In some embodiments, the prime editing methods disclosed herein have an editing efficiency of at least 45% relative to a suitable control. In some embodiments, the prime editing methods disclosed herein have an editing efficiency of at least 50% relative to a suitable control.

[0461] In some embodiments, the methods disclosed herein have an editing efficiency of at least about 1%, at least about 5%, at least about 7.5%, at least about 10%, at least about 15%, at least about 20%, at least about 30%, at least about 40%, at least about 50%, at least about 60%, at least about 70%, at least about 80%, at least about 90%, or at least about 95% of editing a target cell, e.g., a primary cell, relative to a suitable control.

[0462] In some embodiments, the methods disclosed herein have an editing efficiency of at least about 5%, at least about 7.5%, at least about 10%, at least about 15%, at least about 20%, at least about 30%, at least about 40%, at least about 50%, at least about 60%, at least about 70%, at least about 80%, at least about 90%, or at least about 95% of editing a hepatocyte relative to a corresponding control hepatocyte. In some embodiments, the hepatocyte is a human hepatocyte.

[0463] In some embodiments, the prime editing compositions provided herein are capable of incorporated one or more intended nucleotide edits without generating a significant proportion of indels. The term “indel(s)”, as used herein, refers to the insertion or deletion of a nucleotide base within a polynucleotide, for example, a target gene. Such insertions or deletions can lead to frame shift mutations within a coding region of a gene. Indel frequency of editing can be calculated by methods known in the art. In some embodiments, indel frequency can be calculated based on sequence alignment such as the CRISPResso 2 algorithm as described in Clement et al., Nat. Biotechnol. 37(3): 224-226 (2019), which is incorporated herein in its entirety. In some embodiments, the methods disclosed herein can have an indel frequency of less than 20%, less than 10%, less than 9%, less than 8%, less than 7%, less than 6%, less than 5%, less than 4%, less than 3%, less than 2%, less than 1.5%, or less than 1%. In some embodiments, any number of indels is determined after at least 1 hour, at least 2 hours, at least 6 hours, at least 12 hours, at least 24 hours, at least 36 hours, at least 48 hours, at least 3 days, at least 4 days, at least 5 days, at least 7 days, at least 10 days, or at least 14 days of exposing a target gene to a prime editing composition.

[0464] In some embodiments, the prime editing compositions provided herein are capable of incorporated one or more intended nucleotide edits efficiently without generating a significant proportion of indels. In some embodiments, the prime editing methods disclosed herein have an editing efficiency of at least about 1% and an indel frequency of less than 1% in a target cell, e.g., a human primary cell or hepatocyte. In some embodiments, the prime editing methods disclosed herein have an editing efficiency of at least about 1% and an indel frequency of less than 0.5% in a target cell, e.g., a human primary cell or hepatocyte. In some embodiments, the prime editing methods disclosed herein have an editing efficiency of at least about 1% and an indel frequency of less than 0.1% in a target cell, e.g., a human primary cell or hepatocyte. In some embodiments, the prime editing methods disclosed herein have an editing efficiency of at least about 5% and an indel frequency of less than 1% in a target cell, e.g., a human primary cell or hepatocyte. In some embodiments, the prime editing methods disclosed herein have an editing efficiency of at least about 5% and an indel frequency of less than 0.5% in a target cell, e.g., a human primary cell or hepatocyte. In some embodiments, the prime editing methods disclosed herein have an editing efficiency of at least about 5% and an indel frequency of less than 0.1% in a target cell, e.g., a human primary cell.

[0465] In some embodiments, the prime editing methods disclosed herein have an editing efficiency of at least about 7.5% and an indel frequency of less than 1% in a target cell, e.g., a human primary cell or hepatocyte. In some embodiments, the prime editing methods disclosed herein have an editing efficiency of at least about 7.5% and an indel frequency of less than 0.5% in a target cell, e.g., a human primary cell or hepatocyte. In some embodiments, the prime editing methods disclosed herein have an editing efficiency of at least about 7.5% and an indel frequency of less than 0.1% in a target cell, e.g., a human primary cell or hepatocyte.

[0466] In some embodiments, the prime editing methods disclosed herein have an editing efficiency of at least about 10% and an indel frequency of less than 1% in a target cell, e.g., a human primary cell or hepatocyte. In some embodiments, the prime editing methods disclosed herein have an editing efficiency of at least about 10% and an indel frequency of less than 0.5% in a target cell, e.g., a human primary cell or hepatocyte. In some embodiments, the prime editing methods disclosed herein have an editing efficiency of at least about 10% and an indel frequency of less than 0.1% in a target cell, e.g., a human primary cell or hepatocyte.

[0467] In some embodiments, the prime editing methods disclosed herein have an editing efficiency of at least about 15% and an indel frequency of less than 1% in a target cell, e.g., a human primary cell or hepatocyte. In some embodiments, the prime editing methods disclosed herein have an editing efficiency of at least about 15% and an indel frequency of less than 0.5% in a target cell, e.g., a human primary cell or hepatocyte. In some embodiments, the prime editing methods disclosed herein have an editing efficiency of at least about 15% and an indel frequency of less than 0.1% in a target cell, e.g., a human primary cell or hepatocyte.

[0468] In some embodiments, the prime editing methods disclosed herein have an editing efficiency of at least about 20% and an indel frequency of less than 1% in a target cell, e.g., a human primary cell or hepatocyte. In some embodiments, the prime editing methods disclosed herein have an editing efficiency of at least about 20% and an indel frequency of less than 0.5% in a target cell, e.g., a human primary cell or hepatocyte. In some embodiments, the prime editing methods disclosed herein have an editing efficiency of at least about 20% and an indel frequency of less than 0.1% in a target cell, e.g., a human primary cell or hepatocyte.

[0469] In some embodiments, the prime editing methods disclosed herein have an editing efficiency of at least about 30% and an indel frequency of less than 1% in a target cell, e.g., a human primary cell or hepatocyte. In some embodiments, the prime editing methods disclosed herein have an editing efficiency of at least about 30% and an indel frequency of less than 0.5% in a target cell, e.g., a human primary cell or hepatocyte. In some embodiments, the prime editing methods disclosed herein have an editing efficiency of at least about 30% and an indel frequency of less than 0.1% in a target cell, e.g., a human primary cell or hepatocyte.

[0470] In some embodiments, the prime editing methods disclosed herein have an editing efficiency of at least about 40% and an indel frequency of less than 1% in a target cell, e.g., a human primary cell or hepatocyte. In some embodiments, the prime editing methods disclosed herein have an editing efficiency of at least about 40% and an indel frequency of less than 0.5% in a target cell, e.g., a human primary cell or hepatocyte. In some embodiments, the prime editing methods disclosed herein have an editing efficiency of at least about 40% and an indel frequency of less than 0.1% in a target cell, e.g., a human primary cell or hepatocyte.

[0471] In some embodiments, the prime editing methods disclosed herein have an editing efficiency of at least about 50% and an indel frequency of less than 1% in a target cell, e.g., a human primary cell or hepatocyte. In some embodiments, the prime editing methods disclosed herein have an editing efficiency of at least about 50% and an indel frequency of less than 0.5% in a target cell, e.g., a human primary cell or hepatocyte. In some embodiments, the prime editing methods disclosed herein have an editing efficiency of at least about 50% and an indel frequency of less than 0.1% in a target cell, e.g., a human primary cell or hepatocyte.

[0472] In some embodiments, the prime editing methods disclosed herein have an editing efficiency of at least about 60% and an indel frequency of less than 1% in a target cell, e.g., a human primary cell or hepatocyte. In some embodiments, the prime editing methods disclosed herein have an editing efficiency of at least about 60% and an indel frequency of less than 0.5% in a target cell, e.g., a human primary cell or hepatocyte. In some embodiments, the prime editing methods disclosed herein have an editing efficiency of at least about 60% and an indel frequency of less than 0.1% in a target cell, e.g., a human primary cell or hepatocyte.

[0473] In some embodiments, the prime editing methods disclosed herein have an editing efficiency of at least about 70% and an indel frequency of less than 1% in a target cell, e.g., a human primary cell or hepatocyte. In some embodiments, the prime editing methods disclosed herein have an editing efficiency of at least about 70% and an indel frequency of less than 0.5% in a target cell, e.g., a human primary cell or hepatocyte. In some embodiments, the prime editing methods disclosed herein have an editing efficiency of at least about 70% and an indel frequency of less than 0.1% in a target cell, e.g., a human primary cell or hepatocyte.

[0474] In some embodiments, the prime editing methods disclosed herein have an editing efficiency of at least about 80% and an indel frequency of less than 1% in a target cell, e.g., a human primary cell or hepatocyte. In some embodiments, the prime editing methods disclosed herein have an editing efficiency of at least about 80% and an indel frequency of less than 0.5% in a target cell, e.g., a human primary cell or hepatocyte. In some embodiments, the prime editing methods disclosed herein have an editing efficiency of at least about 80% and an indel frequency of less than 0.1% in a target cell, e.g., a human primary cell or hepatocyte.

[0475] In some embodiments, the prime editing methods disclosed herein have an editing efficiency of at least about 90% and an indel frequency of less than 1% in a target cell, e.g., a human primary cell or hepatocyte. In some embodiments, the prime editing methods disclosed herein have an editing efficiency of at least about 90% and an indel frequency of less than 0.5% in a target cell, e.g., a human primary cell or hepatocyte. In some embodiments, the prime editing methods disclosed herein have an editing efficiency of at least about 90% and an indel frequency of less than 0.1% in a target cell, e.g., a human primary cell or hepatocyte.

[0476] In some embodiments, the prime editing methods disclosed herein have an editing efficiency of at least about 95% and an indel frequency of less than 1% in a target cell, e.g., a human primary cell or hepatocyte. In some embodiments, the prime editing methods disclosed herein have an editing efficiency of at least about 95% and an indel frequency of less than 0.5% in a target cell, e.g., a human primary cell or hepatocyte. In some embodiments, the prime editing methods disclosed herein have an editing efficiency of at least about 95% and an indel frequency of less than 0.1% in a target cell, e.g., a human primary cell or hepatocyte. In some embodiments, any number of indels is determined after at least 1 hour, at least 2 hours, at least 6 hours, at least 12 hours, at least 24 hours, at least 36 hours, at least 48 hours, at least 3 days, at least 4 days, at least 5 days, at least 7 days, at least 10 days, or at least 14 days of exposing a target gene (e.g., a gene within the genome of a cell) to a prime editing composition. In some embodiments, the editing efficiency is determined after 1 hour, 2 hours, 6 hours, 12 hours, 24 hours, 36 hours, 48 hours, 3 days, 4 days, 5 days, 7 days, 10 days, or 14 days of exposing a target gene (e.g., a gene within the genome of a cell) to a prime editing composition.

[0477] In some embodiments, the prime editing composition described herein result in less than 50%, less than 40%, less than 30%, less than 20%, less than 19%, less than 18%, less than 17%, less than 16%, less than 15%, less than 14%, less than 13%, less than 12%, less than 11%, less than 10%, less than 9%, less than 8%, less than 7%, less than 6%, less than 5%, less than 4%, less than 3%, less than 2%, less than 1%, less than 0.9%, less than 0.8%, less than 0.7%, less than 0.6%, less than 0.5%, less than 0.4%, less than 0.3%, less than 0.2%, less than 0.1%, less than 0.09%, less than 0.08%, less than 0.07%, less than 0.06%, less than 0.05%, less than 0.04%, less than 0.03%, less than 0.02%, or less than 0.01% off-target editing in a chromosome that includes the target gene. In some embodiments, off-target editing is determined after at least 1 hour, at least 2 hours, at least 6 hours, at least 12 hours, at least 24 hours, at least 36 hours, at least 48 hours, at least 3 days, at least 4 days, at least 5 days, at least 7 days, at least 10 days, or at least 14 days of exposing a target gene (e.g., a nucleic acid within the genome of a cell) to a prime editing composition.

[0478] In some embodiments, the prime editing compositions (e.g., PEgRNAs and prime editors as described herein) and prime editing methods disclosed herein can be used to edit a target gene. In some embodiments, the target gene comprises a mutation compared to a wild type gene. In some embodiments, the mutation is associated a disease. In some embodiments, the target gene comprises an editing target sequence that contains the mutation associated with a disease. In some embodiments, the mutation is in a coding region of the target gene. In some embodiments, the mutation is in an exon of the target gene. In some embodiments, the prime editing method comprises contacting a target gene with a prime editing composition comprising a prime editor, a PEgRNA, and/or a ngRNA. In some embodiments, contacting the target gene with the prime editing composition results in incorporation of one or more intended nucleotide edits in the target gene. In some embodiments, the incorporation is in a region of the target gene that corresponds to an editing target sequence in the gene. In some embodiments, the one or more intended nucleotide edits comprises a single nucleotide substitution, an insertion, a deletion, or any combination thereof, compared to the endogenous sequence of the target gene. In some embodiments, incorporation of the one or more intended nucleotide edits results in replacement of one or more mutations with the corresponding sequence that encodes a wild type protein. In some embodiments, incorporation of the one or more intended nucleotide edits results in replacement of the one or more mutations with the corresponding sequence in a wild type gene. In some embodiments, incorporation of the one more intended nucleotide edits results in correction of a mutation in the target gene. In some embodiments, the target gene comprises an editing template sequence that contains the mutation. In some embodiments, contacting the target gene with the prime editing composition results in incorporation of one or more intended nucleotide edits in the target gene, which corrects the mutation in the editing target sequence (or a double stranded region comprising the editing target sequence and the complementary sequence to the editing target sequence on a target strand) in the target gene.

[0479] In some embodiments, incorporation of the one more intended nucleotide edits results in correction of a mutation in. In some embodiments, incorporation of the one more intended nucleotide edits results in correction of an gene sequence and restores wild type expression and function of the protein.

[0480] In some embodiments, the target gene is in a target cell. Accordingly, in one aspect provided herein is a method of editing a target cell comprising a target gene that encodes a polypeptide that comprises one or more mutations relative to a wild type gene. In some embodiments, the methods of the present disclosure comprise introducing a prime editing composition comprising a PEgRNA, a prime editor polypeptide, and/or a ngRNA into the target cell that has the target gene to edit the target gene, thereby generating an edited cell. In some embodiments, the target cell is a mammalian cell. In some embodiments, the target cell is a human cell. In some embodiments, the target cell is a primary cell. In some embodiments, the target cell is a human primary cell. In some embodiments, the target cell is a progenitor cell. In some embodiments, the target cell is a human progenitor cell. In some embodiments, the target cell is a stem cell. In some embodiments, the target cell is a human stem cell. In some embodiments, the target cell is a hepatocyte. In some embodiments, the target cell is a human hepatocyte. In some embodiments, the target cell is a primary human hepatocyte derived from an induced human pluripotent stem cell (iPSC). In some embodiments, the cell is a neuron. In some embodiments, the cell is a neuron from basal ganglia. In some embodiments, the cell is a neuron from basal ganglia of a subject. In some embodiments, the cell is a neuron in the basal ganglia of a subject.

[0481] In some embodiments, components of a prime editing composition described herein are provided to a target cell in vitro. In some embodiments, components of a prime editing composition described herein are provided to a target cell ex vivo. In some embodiments, components of a prime editing composition described herein are provided to a target cell in vivo.

[0482] In some embodiments, incorporation of the one or more intended nucleotide edits in the target gene that comprises one or more mutations restores wild type expression and function of protein encoded by the gene. In some embodiments, the target gene encodes at least one mutation as compared to the wild type protein prior to incorporation of the one or more intended nucleotide edits. In some embodiments, expression and/or function of protein may be measured when expressed in a target cell. In some embodiments, incorporation of the one or more intended nucleotide edits in the target gene comprising one or more mutations lead to a fold change in a level of gene expression, protein expression, or a combination thereof. In some embodiments, a change in the level of gene expression can comprise a fold change of, e.g., 2-fold, 3-fold, 4-fold, 5-fold, 6-fold, 7-fold, 8-fold, 9-fold, 10-fold, 15-fold, 20-fold, 25-fold, 30-fold, 40-fold, 50-fold, 60-fold, 70-fold, 80-fold, 90-fold, 100-fold or greater as compared to expression in a suitable control cell not introduced with a prime editing composition described herein. In some embodiments, incorporation of the one or more intended nucleotide edits in the target gene that comprises one or more mutations restores wild type expression of protein by at least 10%, 20%, 30%, 40%, 50%, 60%, 70%, 80%, 90%, 95%, 99% or more as compared to wild type expression of the protein in a suitable control cell that comprises a wild type gene.

[0483] In some embodiments, an expression increase can be measured by a functional assay. In some embodiments, protein expression can be measured using a protein assay. In some embodiments, protein expression can be measured using antibody testing. In some embodiments, protein expression can be measured using ELISA, mass spectrometry, Western blot, sodium dodecyl sulfate polyacrylamide gel electrophoresis (SDS-PAGE), high performance liquid chromatography (HPLC), electrophoresis, or any combination thereof. In some embodiments, a protein assay can comprise SDS-PAGE and densitometric analysis of a Coomassie Blue-stained gel.

[0484] Methods of Treating Diseases Associated with Pathological Mutations

[0485] Provided also are methods of treating a disease or disorder that involve the introduction of a prime editor into a disease-associated or disease-causing gene, or into a regulatory sequence (e.g., a gene promoter, enhancer, or repressor) associated with, for example, a gene having a mutation.

[0486] The method comprises administering to a subject (e.g., a mammal, such as a human) a therapeutically effective amount of a pharmaceutical composition that comprises a polynucleotide encoding a prime editor system (e.g., prime editor and PEgRNA) described herein. In some embodiments, the prime editor is a fusion protein that comprises a polynucleotide programmable DNA binding domain and an adenosine deaminase domain or a cytidine deaminase domain. A cell of the subject is transduced with the prime editor and one or more PEgRNA guide polynucleotides that direct the prime editor to effect a desired nucleotide edit in a disease-associated gene, a disease-causing gene, or a regulatory nucleic acid sequence associated with a disease-causing gene. For example, the desired nucleotide edit effected by prime editing my correct a disease associated mutation in the disease causing gene to a wild type gene sequence.

[0487] The methods herein include administering to the subject (including a subject identified as being in need of such treatment, or a subject suspected of being at risk of disease and in need of such treatment) an effective amount of a composition described herein. Identifying a subject in need of such treatment can be in the judgment of a subject or a health care professional and can be subjective (e.g. opinion) or objective (e.g. measurable by a test or diagnostic method).

[0488] In some embodiments, cells are obtained from the subject and contacted with a pharmaceutical composition as provided herein. In some embodiments, cells removed from a subject and contacted ex vivo with a pharmaceutical composition are re-introduced into the subject, optionally after the desired genomic modification has been effected by the prime editor or detected in the cells. Although the descriptions of pharmaceutical compositions provided herein are principally directed to pharmaceutical compositions which are suitable for administration to humans, it will be understood by the skilled artisan that such compositions are generally suitable for administration to animals or organisms of all sorts, for example, for veterinary use.

[0489] Disclosed herein, are prime editors, engineered RTs, and engineered Cas-RTs. Also disclosed are engineered RTs and engineered Cas-RTs. The engineered RTs and the engineered Cas-RTs may comprise amino acid or sequence variations of naturally occurring RTs and Cas-RTs. In some cases, the prime editors, engineered RTs, or engineered Cas-RTs may also comprise heterologous functional domains comprising SET domains. Other functional domains may comprise nuclear localization signals or sequences or linkers. In some instances, the prime editors, engineered RTs, or engineered Cas-RTs may complex with PEgRNAs. In some cases, prime editing may comprise the prime editors, engineered RTs, engineered Cas-RTs, or PEgRNAs. In some cases, a cell may comprise the prime editors, engineered RTs, engineered Cas-RTs, PEgRNAs, any derivatives thereof, or any combinations thereof. In some cases, a composition may comprise the prime editors, engineered RTs, engineered Cas-RTs, PEgRNAs, any derivatives thereof, any combinations thereof, or the cells comprising thereof. In some cases, a method for installing a nucleotide edit may comprise the prime editors, engineered RTs, engineered Cas-RTs, or PEgRNAs. In some cases, a method for treating a disorder may comprise the prime editors, engineered RTs, engineered Cas-RTs, PEgRNAs, any derivatives thereof, any combinations thereof cells comprising thereof, compositions comprising thereof, or kits comprising thereof. Prime editing, the methods for installing a nucleotide edit, the methods for treating a disorder, the methods of reverse transcribing an RNA sequence using the prime editors, engineered RTs, engineered Cas-RTs, PEgRNAs, any derivatives thereof, or any combinations thereof cells comprising thereof are also illustrated in the examples described herein.

[0490] Delivery

[0491] Prime editing compositions described herein can be delivered to a cellular environment with any approach known in the art. Components of a prime editing composition can be delivered to a cell by the same mode or different modes. For example, in some embodiments, a prime editor can be delivered as a polypeptide or a polynucleotide (DNA or RNA) encoding the polypeptide. In some embodiments, a PEgRNA can be delivered directly as an RNA or as a DNA encoding the PEgRNA. In some embodiments, components of a prime editor composition may be delivered as a combination of DNA and RNA. In some embodiments, components of a prime editor composition can be delivered as a combination of nucleic acid, e.g., DNA and/or RNA and protein.

[0492] In some embodiments, a prime editing composition component is encoded by a polynucleotide, a vector, or a construct. In some embodiments, a prime editor polypeptide, a PEgRNA and/or a ngRNA is encoded by a polynucleotide. In some embodiments, the polynucleotide encodes a prime editor fusion protein comprising a DNA binding domain and a DNA polymerase domain. In some embodiments, the polynucleotide encodes a DNA polymerase domain of a prime editor. In some embodiments, the polynucleotide encodes a DNA polymerase domain of a prime editor. In some embodiments, the polynucleotide encodes a portion of a prime editor protein, for example, a N-terminal portion of a prime editor fusion protein connected to an intein-N. In some embodiments, the polynucleotide encodes a portion of a prime editor protein, for example, a C-terminal portion of a prime editor fusion protein connected to an intein-C. In some embodiments, the polynucleotide encodes a PEgRNA and/or a ngRNA. In some embodiments, the polypeptide encodes two or more components of a prime editing composition, for example, a prime editor fusion protein and a PEgRNA.

[0493] In some embodiments, the polynucleotide encoding one or more prime editing composition components is delivered to a target cell is integrated into the genome of the cell for long-term expression, for example, by a retroviral vector. In some embodiments, the polynucleotide delivered to a target cell is expressed transiently. For example, the polynucleotide may be delivered in the form of a mRNA, or a non-integrating vector (non-integrating virus, plasmids, minicircle DNAs) for episomal expression.

[0494] In some embodiments, a polynucleotide encoding one or more prime editing system components can be operably linked to a regulatory element, e.g., a transcriptional control element, such as a promoter. In some embodiments, the polynucleotide is operably linked to multiple control elements. Depending on the expression system utilized, any of a number of suitable transcription and translation control elements, including constitutive and inducible promoters, transcription enhancer elements, transcription terminators, etc. may be used in the expression vector (e.g., U6 promoter, HI promoter).

[0495] In some embodiments, the polynucleotide encoding one or more prime editing composition components is a part of, or is encoded by, a vector, e.g., a plasmid or a virus. In some embodiments, the vector is a viral vector. In some embodiments, the vector is a non-viral vector. In some embodiments, delivery is in vivo, in vitro, ex vivo, or in situ.

[0496] Non-viral vector delivery systems may include DNA plasmids, RNA (e.g., a transcript of a vector described herein), virosome, viral like particle, naked nucleic acid, and nucleic acid complexed with a delivery vehicle, such as a liposome. In some embodiments, the polynucleotide is provided as an RNA, e.g., an mRNA or a transcript. Any RNA of the prime editing systems, for example a guide RNA or a base editor-encoding mRNA, can be delivered in the form of RNA. In some embodiments, one or more components of the prime editing system that are RNAs is produced by direct chemical synthesis or may be transcribed in vitro from a DNA. In some embodiments, an mRNA that encodes a prime editor polypeptide is generated using in vitro transcription. Guide polynucleotides (e.g., PEgRNA or ngRNA) can also be transcribed using in vitro transcription from a cassette containing a T7 promoter, followed by the sequence “GG”, and guide polynucleotide sequence. In some embodiments, the prime editor encoding mRNA, PEgRNA, and/or ngRNA are synthesized in vitro using an RNA polymerase enzyme (e.g., T7 polymerase, T3 polymerase, SP6 polymerase, etc.). Once synthesized, the RNA can directly contact a target gene or can be introduced into a cell using any suitable technique for introducing nucleic acids into cells (e.g., microinjection, electroporation, transfection). In some embodiments, the prime editor-coding sequences, the PEgRNAs, and/or the ngRNAs are modified to include one or more modified nucleoside e.g., using pseudo-U or 5-Methyl-C.

[0497] Methods of non-viral delivery of nucleic acids can include lipofection, nucleofection, microinjection, biolistics, virosomes, liposomes, immunoliposomes, polycation or lipid:nucleic acid conjugates, naked DNA, artificial virions, cell membrane disruption by a microfluidics device, and agent-enhanced uptake of DNA. Cationic and neutral lipids that are suitable for efficient receptor-recognition lipofection of polynucleotides can be used. Delivery can be to cells (e.g., in vitro or ex vivo administration) or target tissues (e.g., in vivo administration). The preparation of lipid:nucleic acid complexes, including targeted liposomes such as immunolipid complexes, can be used. In some embodiments, the compositions and systems described herein can be formulated in liposomes or other similar vesicles. Liposomes may be anionic, neutral or cationic.

[0498] Viral vector delivery systems can include DNA and RNA viruses, which can have either episomal or integrated genomes after delivery to the cell. RNA or DNA viral based systems can be used to target specific cells and trafficking the viral payload to an organelle of the cell. Viral vectors can be administered directly (in vivo), or they can be used to treat cells in vitro, and the modified cells can optionally be administered (ex vivo). In some embodiments, the virus is selected from a group I virus (e.g., a dsDNA virus), group II virus (e.g., a ssDNA virus), group III virus (e.g., a dsRNA virus), group IV virus (e.g., a +ssRNA virus), group V virus (e.g., a -ssRNA virus), group VI virus (e.g., a ssRNA-RT virus), or a group VII virus (e.g., a dsDNA-RT virus).

[0499] In some embodiments, the viral vector is a retroviral, lentiviral, adenoviral, adeno-associated viral, or herpes simplex viral vector. Retroviral vectors can include those based upon murine leukemia virus (MuLV), gibbon ape leukemia virus (GaLV), simian immunodeficiency virus (SIV), human immunodeficiency virus (HIV), and combinations thereof. In some embodiments, the retroviral vector is a lentiviral vector. In some embodiments, the retroviral vector is a gamma retroviral vector. In some embodiments, the viral vector is an adenoviral vector. In some embodiments, the viral vector is an adeno-associated virus (“AAV”) vector. In some embodiments, the AAV is a recombinant AAV (rAAV).

[0500] In some embodiments, polynucleotides encoding one or more prime editing composition components are packaged in a virus particle. Packaging cells can be used to form virus particles that can infect a target cell. Such cells can include 293 cells, (e.g., for packaging adenovirus), and kv2 cells or PA317 cells (e.g., for packaging retrovirus). Viral vectors can be generated by producing a cell line that packages a nucleic acid vector into a viral particle. The vectors can contain the minimal viral sequences required for packaging and subsequent integration into a host. The vectors can contain other viral sequences being replaced by an expression cassette for the polynucleotide(s) to be expressed. The missing viral functions can be supplied in trans by the packaging cell line. For example, AAV vectors can comprise ITR sequences from the AAV genome which are required for packaging and integration into the host genome. In some embodiments, the AAV vector is selected for tropism to a particular cell, tissue, organism. In some embodiments, the AAV vector is pseudotyped, e.g., AAV5/8. In some embodiments, polynucleotides encoding one or more prime editing composition components are packaged in a first AAV and a second AAV. In some embodiments, the polynucleotides encoding one or more prime editing composition components are packaged in a first rAAV and a second rAAV.

[0501] In some embodiments, dual AAV vectors are generated by splitting a large transgene expression cassette in two separate halves (5′ and 3′ ends that encode N-terminal portion and C-terminal portion of, e.g., a prime editor polypeptide), where each half of the cassette is no more than 5 kb in length, optionally no more than 4.7 kb in length, and is packaged in a single AAV vector. In some embodiments, the full-length transgene expression cassette is reassembled upon co-infection of the same cell by both dual AAV vectors. In some embodiments, a portion or fragment of a prime editor polypeptide, e.g., a Cas9 nickase, is fused to an intein. The portion or fragment of the polypeptide can be fused to the N-terminus or the C-terminus of the intein. In some embodiments, a N-terminal portion of the polypeptide is fused to an intein-N, and a C-terminal portion of the polypeptide is separately fused to an intein-C. In some embodiments, a portion or fragment of a prime editor fusion protein is fused to an intein and fused to an AAV capsid protein. Ii some embodiments, intein-N may be fused to the N-terminal portion of a first domain described herein, and intein-C may be fused to the C-terminal portion of a second domain described herein for the joining of the N-terminal portion to the C-terminal portion, thereby joining the first and second domains. In some embodiments, the first and second domains are each independently chosen from a DNA binding domain or a DNA polymerase domain. The intein, nuclease and capsid protein can be fused together in any arrangement (e.g., nuclease-intein-capsid, intein-nuclease-capsid, capsid-intein-nuclease, etc.). In some embodiments, a polynucleotide encoding a prime editor fusion protein is split in two separate halves, each encoding a portion of the prime editor fusion protein and separately fused to an intein. In some embodiments, each of the two halves of the polynucleotide is packaged in an individual AAV vector of a dual AAV vector system. In some embodiments, each of the two halves of the polynucleotide is no more than 5 kb in length, optionally no more than 4.7 kb in length. In some embodiments, the full-length prime editor fusion protein is reassembled upon co-infection of the same cell by both dual AAV vectors, expression of both halves of the prime editor fusion protein, and self-excision of the inteins. In some embodiments, the in vivo use of dual AAV vectors results in the expression of full-length full-length prime editor fusion proteins. In some embodiments, the use of the dual AAV vector platform allows viable delivery of transgenes of greater than about 4.5, 4.6, 4.7, 4.8, 4.9, or 5.0 kb in size.

[0502] In some embodiments, an intein is inserted at a splice site within a Cas protein. In some embodiments, insertion of an intein disrupts a Cas activity. As used herein, “intein” refers to a self-splicing protein intron (e.g., peptide), e.g., which ligates flanking N-terminal and C-terminal exteins (e.g., fragments to be joined). In some embodiments, an intein may comprise a polypeptide that is able to excise itself and join exteins with a peptide bond (e.g., protein splicing). In some embodiments, an intein of a precursor gene comes from two genes (e.g., split intein). In some embodiments, an intein may be a synthetic intein. Non-limiting examples of intein pairs that may be used in accordance with the present disclosure include: dnaE-n and dnaE-c. a 4-hydroxytamoxifen (4-HT)-responsive intein, an iCas molecule, a Ssp DnaX intein, Ter DnaE3 intein, Ter ThyX intein, Rma DnaB intein, Cfa DnaE intein, Ssp GyrB intein, and Rma DnaB intein. In some embodiments, intein fragments may be fused to the N terminal and C-terminal portion of a split Cas protein respectively for joining the fragments of split Cas9.

[0503] In some embodiments, the split Cas9 system may be used in general to bypass the packing limit of the viral delivery vehicles. In some embodiments, a split Cas9 may be a Type II CRISPR system Cas9. In some embodiments, a first nucleic acid encodes a first portion of the Cas9 protein having a first split-intein and wherein the second nucleic acid encodes a second portion of the Cas9 protein having a second split-intein complementary to the first split-intein and wherein the first portion of the Cas9 protein and the second portion of the Cas9 protein are joined together to form the Cas9 protein. In some embodiments, the first portion of the Cas9 protein is the N-terminal fragment of the Cas9 protein and the second portion of the Cas9 protein is the C-terminal fragment of the Cas9 protein. In some embodiments, a split site may be selected which are surface exposed due to the sterical need for protein splicing.

[0504] In some embodiments, a Can protein may be split into two fragments at any C, T, A, or S. In some embodiments, a Cas9 may be intein split at residues 203-204, 280-292, 292-364, 311-325, 417-438, 445-483, 468-469, 481-502, 513-520, 522-530, 565-637, 696-707, 713-714, 795-804, 803-810, 878-887, and 1153-1154. In some embodiments, protein is divided into two fragments at SpCas9 T310, T313, A456, S469, or C574. In some embodiments, split Cas9 fragments across different split pairs yield combinations that provided the complete polypeptide sequence activate gene expression even when fragments are partially redundant. In some embodiments, a functional Cas9 protein may be reconstituted from two inactive split-Cas9 peptides in the presence of gRNA by using a split-intein protein splicing strategy. In some embodiment, the split Cas9 fragments are fused to either a N-terminal intein fragment or a C-terminal intein fragment, which can associate with each other and catalytically splice the two split Cas9 fragments into a functional reconstituted Cas9 protein. In some embodiments, a split-Cas9 can be packaged into self-complementary AAV. In some embodiments, a split-Cas9 comprises a 2.5 kb and a 2.2 kb fragment of S. pyogenes Cas9 coding sequences.

[0505] In some embodiments, a split-Cas9 architecture reduces the length and/or size of the coding sequences of a viral vector, e.g., AAV.

[0506] A target cell can be transiently or non-transiently transfected with one or more vectors described herein. A cell can be transfected as it naturally occurs in a subject. A cell can be taken or derived from a subject and transfected. A cell can be derived from cells taken from a subject, such as a cell line. In some embodiments, a cell transfected with one or more vectors described herein can be used to establish a new cell line comprising one or more vector-derived sequences. In some embodiments, a cell transiently transfected with the compositions of the disclosure (such as by transient transfection of one or more vectors, or transfection with RNA), and modified through the activity of a prime editor, can be used to establish a new cell line comprising cells containing the modification but lacking any other exogenous sequence. Any suitable vector compatible with the host cell can be used with the methods of the disclosure. Non-limiting examples of vectors include pXT1, pSG5, pSVK3, pBPV, pMSG, and pSVLSV40.

[0507] In some embodiments, a prime editor protein can be provided to cells as a polypeptide. In some embodiments, the prime editor protein is fused to a polypeptide domain that increases solubility of the protein. In some embodiments, the prime editor protein is formulated to improve solubility of the protein.

[0508] In some embodiment, a prime editor polypeptide is fused to a polypeptide permeant domain to promote uptake by the cell. In some embodiments, the permeant domain is a including peptide, a peptidomimetic, or a non-peptide carrier. For example, a permeant peptide may be derived from the third alpha helix of Drosophila melanogaster transcription factor Antennapaedia, referred to as penetratin, which comprises the amino acid sequence RQIKIWFQNRRMKWKK(SEQ ID NO: 936). As another example, the permeant peptide can comprise the HIV-1 tat basic region amino acid sequence, which may include, for example, amino acids 49-57 of naturally-occurring tat protein. Other permeant domains can include poly-arginine motifs, for example, the region of amino acids 34-56 of HIV-1 rev protein (SEQ ID NO: 937), nona-arginine, and octa-arginine(SEQ ID NO: 938). The nona-arginine (R9) sequence(SEQ ID NO: 937) can be used. The site at which the fusion can be made may be selected in order to optimize the biological activity, secretion or binding characteristics of the polypeptide.

[0509] In some embodiments, a prime editor polypeptide is produced in vitro or by host cells, and it may be further processed by unfolding, e.g., heat denaturation, DTT reduction, etc. and may be further refolded. In some embodiments, a prime editor polypeptide is prepared by in vitro synthesis. Various commercial synthetic apparatuses can be used. By using synthesizers, naturally occurring amino acids can be substituted with unnatural amino acids. In some embodiments, a prime editor polypeptide is isolated and purified in accordance with recombinant synthesis methods, for example, by expression in a host cell and the lysate purified using HPLC, exclusion chromatography, gel electrophoresis, affinity chromatography, or other purification technique.

[0510] In some embodiments, a prime editing composition, for example, prime editor polypeptide components and PEgRNA/ngRNA are introduced to a target cell by nanoparticles. In some embodiments, the prime editor polypeptide components and the PEgRNA and/or ngRNA form a complex in the nanoparticle. Any suitable nanoparticle design can be used to deliver genome editing system components or nucleic acids encoding such components. In some embodiments, the nanoparticle is inorganic. In some embodiments, the nanoparticle is organic. In some embodiments, a prime editing composition is delivered to a target cell, e.g., a hepatocyte, in an organic nanoparticle, e.g., a lipid nanoparticle (LNP), (e.g., a cationic lipid nanoparticle, an ionizable lipid nanoparticle), a micelle, polymer nanoparticle, Lipid—polymer nanoparticles (PLNs), or a combination thereof.

[0511] In some embodiments, LNPs are formulated from cationic, anionic, neutral lipids, or combinations thereof. In some embodiments, neutral lipids, such as the fusogenic phospholipid DOPE or the membrane component cholesterol, are included to enhance transfection activity and nanoparticle stability. In some embodiments, a lipid nanoparticle may comprise a conjugated lipid, e.g., a PEG-phospholipid. Lipid nanoparticles may include additional elements, e.g., a polymer. In some embodiments, LNPs are formulated with hydrophobic lipids, hydrophilic lipids, or combinations thereof. Lipids may be formulated in a wide range of molar ratios to produce an LNP. Any lipid or combination of lipids that are known in the art can be used to produce an LNP. In some embodiments, the lipid particle comprises a cationic lipid, a non-cationic lipid, a conjugated lipid that inhibits aggregation of particles, and/or a sterol. Exemplary lipids used to produce LNPs are provided in Tables 18 and 19 below. In some embodiments, a cationic lipid may be an ionizable cationic lipid, e.g., a cationic lipid that may carry a positive charge or be neutral depending on pH, or an amine-containing lipid that can be readily protonated. In some embodiments, a lipid nanoparticle may comprise a second cationic lipid.

[0512] In some embodiment, a polynucleotide encoding a prime editor polypeptide component may be co-formulated with a cationic lipid. In some embodiments, the nucleic acid may be encapsulated in an LNP. In embodiments, the LNP formulation is biodegradable. In some embodiments, LNPs are directed to specific tissues e.g., by displaying biological ligands on the surface of LNPs to enhance interaction with cognate receptors. In some embodiments, all components of a prime editor may be delivered in a single LNP formulation. In some embodiments, components of a prime editor may be delivered by separate LNP formulations.

[0513] In some embodiments, components of a prime editing composition form a complex prior to delivery to a target cell. For example, a prime editor fusion protein, a PEgRNA, and/or a ngRNA can form a complex prior to delivery to the target cell. In some embodiments, a prime editing polypeptide (e.g., a prime editor fusion protein) and a guide polynucleotide (e.g., a PEgRNA or ngRNA) form a ribonucleoprotein (RNP) for delivery to a target cell. In some embodiments, the RNP comprises a prime editor fusion protein in complex with a PEgRNA. RNPs may be delivered to cells using known methods, such as electroporation, nucleofection, or cationic lipid-mediated methods, or any other approaches known in the art. In some embodiments, delivery of a prime editing composition or complex to the target cell does not require the delivery of foreign DNA into the cell. In some embodiments, the RNP comprising the prime editing complex is degraded over time in the target cell. Exemplary lipids for use in nanoparticle formulations and/or gene transfer are shown in Table 18 and 19 below.

TABLE 18
Exemplary lipids for nanoparticle formulation or gene transfer

| Lipid | Abbreviation | Feature |
|---|---|---|
| 1,2-Dioleoyl-sn-glycero-3-phosphatidylcholine | DOPC | Helper |
| 1,2-Dioleoyl-sn-glycero-3-phosphatidylethanolamine | DOPE | Helper |
| Cholesterol | | Helper |
| N41-(2,3-Dioleyloxy)prophyliN,N,N-trimethylammonium | DOTMA | Cationic |
| chloride | | |
| 1,2-Dioleoyloxy-3-trimethylammonium-propane | DOGS | Cationic |
| Dioctadecylamidoglycylspermine | | |
| N-(3-Aminopropy 1)-N,N-dimethy 1-2,3-bis(dodecyloxy)-1- | GAP-DLRIE | Cationic |
| propanaminium bromide | | |
| Cetyltrimethylammonium bromide | CTAB | Cationic |
| 6-Lauroxyhexyl omithinate | LHON | Cationic |
| 1-(2,3-Dioleoyloxypropy 1)-2,4,6-trimethylpyridinium | 2Oc | Cationic |
| 2,3-Dioleyloxy-N-P(spenninecarboxamido-ethy 1J-N,Ndimethyl- | DOSPA | Cationic |
| 1-propanatninium trifluoroacetate | | |
| 1,2-Dioley 1-3-trimethylamtnonium-propane | DOPA | Cationic |
| N-(2-Hydroxyethyl)-N,N-dimethy 1-2,3-bis(tetradecyloxy)-1- | MDRIE | Cationic |
| propanaminium bromide | | |
| Dimyristooxypropyl dimethyl hydroxyethyl ammonium bromide | DMRI | Cationic |
| 3β-[N-(N′,N′-Dimethylaminoethane)-carbamoyl]cholesterol | DC-Chol | Cationic |
| Bis-guanidium-tren-cholesterol | BGTC | Cationic |
| 1,3-Diodeoxy-2-(6-carboxy-spermy 1)-propylamide | DOSPER | Cationic |
| Dimethyloctadecylammonium bromide | DDAB | Cationic |
| Dioctadecylamidoglicylspermidin | DSL | Cationic |
| rac-[(2,3-Dioctadecyloxypropyl)(2-hydroxyethyl)]- | CLIP-1 | Cationic |
| dimethylammonium chloride | | |
| rac-[2(2,3-Dihexadecyloxypropyloxymethyloxy) | CLIP-6 | Cationic |
| ethyl]trimethylammoniun bromide | | |
| Ethyldimyristoylphosphatidylcholine | EDMPC | Cationic |
| 1,2-Distearyloxy-N,N-dimethyl-3-aminopropane | DSDMA | Cationic |
| 1,2-Dimyristoyl-trimethylammonium propane | DMTAP | Cationic |
| O,O′-Dimyristyl-N-lysyl aspartate | DMKE | Cationic |
| 1,2-Distearoyl-sn-glycero-3-ethylpho sphocholine | DSEPC | Cationic |
| N-Palmitoyl D-erythro-sphingosyl carbamoyl-spenmine | CCS | Cationic |
| N-t-Butyl-N0-tetradecy1-3-tetradecylaminopropionamidine | diC14-amidine | Cationic |
| Octadecenolyoxy [ethyl-2-heptadeceny1-3 hydroxyethyl] | DOTIM | Cationic |
| imidazolinium chloride | | |
| N1-Cholesteryloxycarbonyl-3,7-diazanonane-1,9-diamine | CDAN | Cationic |
| 2-(3-Bis(3-amino-propy1)-amino]propylamino)- | RPR209120 | Cationic |
| Nditetradecylcarbamoylme-ethyl-acetamide | | |
| 1,2-dilinoleyloxy-3-dimethylaminopropane | DLinDMA | Cationic |
| 2,2-dilinoley 1-4-dimethylaminoethyl-[1,3]-dioxolane | DLin-KC2- | Cationic |
| | DMA | |
| dilinoleyl-methyl-4-dimethylaminobutyrate | DLin-MC3- | Cationic |
| | DMA | |

[0514] Exemplary polymers for use in nanoparticle formulations and/or gene transfer are shown in Table 19 below.

TABLE 19
Exemplary lipids for nanoparticle formulation or gene transfer

| Polymer | Abbreviation |
|---|---|
| Poly(ethylene)glycol | PEG |
| Polyethylenimine | PEI |
| Dithiobis (succinimidylpropionate) | DSP |
| Dimethyl-3,3′-dithiobispropionimidate | DTBP |
| Poly(ethylene imine)biscarbamate | PEIC |
| Poly(L-lysine) | PLL |
| Histidine modified PLL | |
| Poly(N-vinylpyrrolidone) | PVP |
| Poly(propylenimine) | PPI |
| Poly(amidoamine) | PAMAM |
| Poly(amidoethylenimine) | SS_PAEI |
| Triethylenetetramine | TETA |
| Poly(ß-aminoester) | |
| Poly(4-hydroxy-L-proline ester) | PHP |
| Poly(allylamine) | |
| Poly(α-[4-aminobuty1]-L-glycolic acid) | PAGA |
| Poly(D,L-lactic-co-glycolic acid) | PLGA |
| Poly(N-ethyl-4-vinylpyridinium bromide) | |
| Poly(phosphazene)s | PPZ |
| Poly(phosphoester)s | PPE |
| Poly(phosphoramidate)s | PPA |
| Poly(N-2-hydroxypropylmethacrylamide) | pHPMA |
| Poly (2-(dimethylamino)ethyl methacrylate) | pDMAEMA |
| Poly(2-aminoethyl propylene phosphate) | PPE-EA |
| Chitosan | |
| Galactosylated chitosan | |
| N-dodacylated chitosam | |
| Histone | |
| Collagen | |
| Dextran-spermine | D-SPM |

[0515] Exemplary delivery methods for polynucleotides encoding prime editing composition components are shown in Table 20 below.

TABLE 20
Exemplary polynucleotide delivery methods

| | | Delivery into | | | Type of |
|---|---|---|---|---|---|
| | | Non-Dividing | Duration of | Genome | Molecule |
| Delivery | Vector/Mode | Cells | Expression | Integration | Delivered |
| Physical | (e.g., | YES | Transient | NO | Nucleic Acids |
| | electroporation, | | | | and Proteins |
| | particle gun, | | | | |
| | Calcium phosphate | | | | |
| | transfection) | | | | |
| Viral | Retrovirus | NO | Stable | YES | RNA |
| | Lentivirus | YES | Stable | YES/NO with | RNA |
| | | | | modification | |
| | Adenovirus | YES | Transient | NO | DNA |
| | Adeno-Associated | YES | Stable | NO | DNA |
| | Virus (AAV) | | | | |
| | Vaccinia Virus | YES | Very Transient | NO | DNA |
| | Herpes Simplex | YES | Stable | NO | DNA |
| | Virus | | | | |
| Non-Viral | Cationic liposome | YES | Transient | Depends on | Nucleic acids |
| | | | | what is | and Proteins |
| | | | | delivered | |
| | Polymeric | YES | Transient | NO | Nucleic Acids |
| | Nanoparticles | | | | |
| Biological | Attenuated Bacteria | YES | Transient | NO | Nucleic Acids |
| Non-Viral | Engineered | YES | Transient | NO | Nucleic Acids |
| Delivery | Bacteriophages | | | | |
| Vehicles | Mammalian Virus- | YES | Transient | NO | Nucleic Acids |
| | like Particles | | | | |
| | Biological | YES | Transient | NO | Nucleic Acids |
| | liposomes: | | | | |
| | Erythrocyte Ghosts | | | | |
| | and Exosomes | | | | |

[0516] The prime editing compositions of the disclosure, whether introduced as polynucleotides or polypeptides, may be provided to the cells for about 30 minutes to about 24 hours, e.g., 1 hour, 1.5 hours, 2 hours, 2.5 hours, 3 hours, 3.5 hours 4 hours, 5 hours, 6 hours, 7 hours, 8 hours, 12 hours, 16 hours, 18 hours, 20 hours, or any other period from about 30 minutes to about 24 hours, which can be repeated with a frequency of about every day to about every 4 days, e.g., every 1.5 days, every 2 days, every 3 days, or any other frequency from about every day to about every four days. The compositions may be provided to the subject cells one or more times, e.g., one time, twice, three times, or more than three times, and the cells allowed to incubate with the agent(s) for some amount of time following each contacting event e.g., 16-24 hours. In cases in which two or more different prime editing system components, e.g., two different polynucleotide constructs are provided to the cell (e.g., different components of the same prim editing system, or two different guide nucleic acids that are complementary to different sequences within the same or different target genes), the compositions may be delivered simultaneously (e.g., as two polypeptides and/or nucleic acids). Alternatively, they may be provided sequentially, e.g., one composition being provided first, followed by a second composition.

[0517] The prime editing compositions and pharmaceutical compositions of the disclosure, whether introduced as polynucleotides or polypeptides, can be administered to subjects in need thereof for about 30 minutes to about 24 hours, e.g., 1 hour, 1.5 hours, 2 hours, 2.5 hours, 3 hours, 3.5 hours 4 hours, 5 hours, 6 hours, 7 hours, 8 hours, 12 hours, 16 hours, 18 hours, 20 hours, or any other period from about 30 minutes to about 24 hours, which can be repeated with a frequency of about every day to about every 4 days, e.g., every 1.5 days, every 2 days, every 3 days, or any other frequency from about every day to about every four days. The compositions may be provided to the subject one or more times, e.g., one time, twice, three times, or more than three times. In cases in which two or more different prime editing system components, e.g., two different polynucleotide constructs are administered to the subject (e.g., different components of the same prim editing system, or two different guide nucleic acids that are complementary to different sequences within the same or different target genes), the compositions may be administered simultaneously (e.g., as two polypeptides and/or nucleic acids). Alternatively, they may be provided sequentially, e.g., one composition being provided first, followed by a second composition.

[0518] The disclosure is not limited to the embodiments described and exemplified above, but is capable of variation and modification within the scope of the appended claims.

### EXAMPLES

[0519] These examples are provided for illustrative purposes only and not to limit the scope of the claims provided herein.

### Example 1—General Material and Methods

[0520] pegRNA and ngRNA assembly: For each pegRNA or nicking guide RNA (ngRNA), oligos encoding a spacer, a gRNA scaffold, and an extension arm (for nicking guide RNA, a spacer and a gRNA scaffold) were ligated by Gibson assembly or Golden Gate assembly and cloned into a U6 expression plasmid as described in Anzalone et al., Nature.2019 December; 576(7785): 149-157. Sequences of pegRNAs and ngRNAs are provided in Table 17, where editing targets of each pegRNA or ngRNA are also indicated.

[0521] HEK293 Transfection: HEK293T cells were seeded on 48-well poly-D-lysine coated plates (Corn-ing). Between 16 and 24 h after seeding, cells are transfected at approximately 60% confluency with 1 μl lipofectamine 2000 (Thermo Fisher Scientific) according to the manufacturer's protocols and 750 ng plasmid that expressed prime editors and 250 ng plasmid that expressed PEgRNAs. Cells are cultured for 3 days following transfection, after which the medium was removed, the cells were washed with lx PBS solution (Thermo Fisher Scientific). 3 biological replicates for each site are collected and genomic DNA is extracted by the addition of 150 μl of freshly prepared lysis buffer (10 mM Tris-HCl, pH 7.5; 0.05% SDS; 25 μg/ml proteinase K (ThermoFisher Scien-tific)) directly into each well of the tissue culture plate.

[0522] Editing activity determination: The genomic DNA mixture is incubated at 37° C. for 1-2 h, followed by an 80° C. enzyme inactivation step for 30 mM. Amplicons of the target loci are generated, barcoded, and sequenced on a Miseq from Illumina. Percent editing at the target locus is determined with Crispresso2 (Clement, K. et al., “CRISPResso2 provides accurate and rapid genome editing sequence analysis.” 2019, Nat Biotechnol 37, 224-226).

### Example 2: Reverse Transcriptase Homolog Screen

[0523] Reverse transcriptases (RTs) are abundant throughout eukaryotic and bacterial domains of life with over 600,000 reverse transcriptase sequences deposited in the NCBI. A hidden Markov model of evolutionary relationship (HMMER) model (See Eddy et al., “Profile hidden Markov models.” 1998, Bio-informatics 14, 755-763) was created by a search for homologous RT sequences from the National Center for Biotechnology Information (NCBI) and Uniprot sequence databases using 1305 viral RT sequences collected from the Uniprot viral proteome dataset as bait sequences. The search revealed 51,263 sequences with a significance bit score above 25.0 indicating likely homology to the input Viral RT sequences. Representative sequences from the full set of sequences were selected using the CD-hit2 (See Li, et al., “A. Cd-hit: a fast program for clustering and comparing large sets of protein or nucleotide sequences.” 2006, Bioinformatics 22, 1658-1659) software package with a cut-off of 80% sequence identity resulting in a set of 12,061 representative sequences. The resulting set of RT protein sequences was aligned with MAFFT3 sequence aligner. Following the initial alignment, the RT protein sequences were aligned an additional 499 times with stochastically selected alignment columns removed (bootstrapping) to identify areas of uncertainty in the alignment. The identified positions of uncertainty in the alignment were masked during further calculations. The masked protein sequence alignment was fitted to an evolutionary model using ModelFinder4 and a set of 350 evolutionary models. The best-fitting model, LG+R10+INV was used to infer a maxi-mum likelihood phylogenetic tree with 1000 bootstraps using the IQ-Tree5 software suite as shown in FIG. 9A. The resulting tree was searched for 89 sequences that best represent the topology of the tree and maximize the sequence diversity of RTs to place in an initial screen for PE activity, as illustrated in FIG. 9B. To identify additional RTs with Prime editing activity, the resulting tree identified above was further searched. These sequences were placed in an initial screen for prime editing efficiency.

[0524] To screen for activity in the Prime Editor context, prime editors were constructed by replacing the MMLV-RT domain in the PE2 fusion protein (sequences shown in Table 15) with each of the identified reverse transcriptase domains. A simplified schematic of the prime editor configuration is provided in FIG. 10A. The resulting constructs were transfected into HEK293 cells along with corresponding plasmids encoding pegRNAs (and ngRNAs where applicable) targeting endogenous genetic loci using methods as described in Example 1 Initial screening results of editing efficiency targeting endogenous loci VEGFA, RNF2, and HEK3 are shown in FIG. 10B.

[0525] To further screen reverse transcriptase variants for Prime Editing activity, clades were selected from the full tree containing the representative sequences found to have Prime Editing activity in our initial survey screen. The resulting sequence list was used as inputs into a HMMER search using the HMM model described above to search three publicly available databases (NCBI, PATRIC, Uniprot). This sequence list was then passed through CD-HIT as described above to remove redundant sequences to a sequence identity of 85%. The resulting sequences were screened for prime editing activity as described above. Intermediate results of this screening at the VEGA locus are shown in FIG. 5. A set of RT homolog sequences tested in the Prime Editing context is provided in Table 1 and 2 (SEQ ID NO: 1-80, 198-271, 319-493, and 990-1006). Table 2 lists the reverse transcriptase homologs shown to have significant editing activity in the prime editing; editing efficiency at multiple genomic loci and construct sequences are reported. Except for the CasRT_2 and CasRT_6 constructs, which are discussed in Example 5, all the RT homologs in Table 2 were tested in Prime Editor constructs based on the PE2 design.

### Example 3—Ancestral Sequence Reconstruction (ASR) of the Zebrafish Endogenous Retrovirus (ZFERV) Subfamily of Reverse Transcriptase

[0526] ASR is a method by which a phylogenetic tree, a model of evolution, and a sequence alignment are used to infer the most likely sequences at nodes in the input phylogenetic tree. Ancestral reconstructed sequences may have several desirable properties including increased stability, increased solubility, reduced sequence length, broader activity, and increased activity.

[0527] Using the phylogenetic tree constructed above of 12,061 sequences in the RT superfamily, the sequences and the phylogenetic sub-tree containing within the ZFERV family of retroviral RT, of which MMLV is a member, was isolated. The resulting sequence alignment was refined with MAFFT4. As shown in FIG. 11A, the tree was refined using the ZFERV specific alignment with the initial subtree as input. The evolutionary model described above (LG+R10+INV) was retained for the analysis. The resulting phylogenetic tree, evolutionary model, and alignment were used as input for the codeML algorithm, which is part of the PAML software package. Inferred ancestral sequences from codeML required additional inference of insertion and deletion (indels) events. The resulting sequences, starting tree, and alignment were used as input into RAxML for indel inference. Prime editors were constructed by replacing the MMLV-RT domain in the PE2 fusion protein (sequences shown in Table 15) with each of the identified ASR RTs in Table 3 (SEQ ID Nos 81-95). . The resulting constructs encoding the PE fusion proteins (Table 4A) were transfected into HEK293 cells along with PEgRNA targeting one of 3 genomic loci (HEK3, RNF2, or VEGFA) using the protocols described in EXAMPLE 1. As shown in FIG. 11B, several ZFERV ancestor sequences were found to be active in the PE editing context. Editing efficiencies achieved in the Prime Editing context with the active ASR RTs at the 3 genetic loci are reported in Table 4.

### Example 4—PE Fusion Protein with GB1 Domain

[0528] To examine the effect of prime editor solubility to editing efficiency, RNaseH domain of the MMLV-RT component of PE2 was removed by truncating the C-terminal portion of MMLV after amino acid residue D497 of SEQ ID NO: 504 (referred to herein as the “PE2d497RT”). Two solubility enhancement domains, GB1 and a basic variant of GB1 (bGB1), were used to generate PE variants. The bGB1 variant contains surface amino acid substitutions D22N, D36R, and E42K compared to the GB1 domain to reduce the number of acidic amino acids. Prime editor fusion proteins were constructed, from N terminus to C terminus, as follows: 1) PE2 N-terminal NLS-Cas9H840A-PE2 linker-PE2MMLVRT-GB1-PE2 C-terminal NLS; 2) PE2 N-terminal NLS-Cas9H840A-PE2 linker-PE2MMLVRT-bGB1-PE2 C-terminal NLS; 3) PE2 N-terminal NLS-Cas9H840A-PE2 linker-PE2d497RT-GB1-PE2 C-terminal NLS; or 4) PE2 N-terminal NLS-Cas9H840A-PE2 linker-PE2d497RT-bGB1-PE2 C-terminal NLS. Configuration of these PE variants are shown in FIG. 12A, and the sequences are provided in Table 6 (SEQ ID Nos 125-128).

[0529] Plasmids encoding the PE variants were transfected into HEK293 cells along with pegRNAs targeting 3 genetic loci (HEK3, RNF2 and VEGFA) as described in EXAMPLE 1. As shown in FIG. 12B, prime editing activities were observed for all four constructs. The PE2 with the truncated MMLV domain and the bGB1 domain showed the greatest overall activity with an average editing percentage of about 18.5% across three sites.

### Example 5— PE with Reverse Transcriptase Domain from Cas-RTs

[0530] In some type III CRISPR systems, Cas1 is naturally fused to a reverse transcriptase, which may be referred to as a Cas-RT, and which may be used by bacteria to acquire spacers from RNA viruses. Exemplary Cas-RT domains are in Table 2 (CasRT_2 & CasRT_7), Tables 7, and 13. The Cas1 domain of various naturally occurring Cas1-RT fusion proteins was replaced at the conserved Cas1 domain boundary with a Cas9 domain, resulting in an engineered protein containing an spCas9 (H840A) nickase fused to the Cas1-RT domain and the endogenous linker sequence. A simplified schematic of the prime editor configuration is provided in FIG. 13A.

[0531] The resulting constructs were transfected into HEK293 cells targeting 2 genetic loci (RNF2 and VEGFA) using methods described in EXAMPLE 1. Two biological replicates for each site were collected. Initial results are shown in FIG. 13B; prime editing activities were observed in eight of out the nine constructs tested. Exemplary PE sequences with various Cas-RTs are listed in SEQ ID NO: 847-854 (Table 14). Additional experiments were performed with constructs made with the CasRT_2 and CasRT_6 RT domains (sequences in Table 2), the results of which are reported in the table 22 below.

TABLE 22
shows prime editing activities of prime editor constructs comprising CasRT_2 and
CasRT_6 RT domains

| Construct | Corresponding | Editing Efficiency (%) | | | | | Accession | | |
|---|---|---|---|---|---|---|---|---|---|
| Name | Cas | VEGFA | HEK3 | RNF2 | EMX1 | FANCF | No. | Species | Clade |
| CasRT_2 | SEQ ID | 9.2 | NA | 2.3 | NA | 6.8 | F2K1V9 | Marinomonas | CasRT |
| | NO. 209 | | | | | | | mediterranea | |
| CasRT_6 | SEQ ID | 2.1 | NA | 0.2 | NA | 3.2 | B3EIR7 | Chlorobium | CasRT |
| | NO. 210 | | | | | | | limicola | |

### Example 6—Identification of RT Families and Family Members

[0532] To identify RT subfamily members the phylogenetic tree and taxon sequences are separated into clades whereas a Glade is a group of sequences believed to have evolved from a common ancestor. Taxon sequences within clades are then searched for representee expert annotated sequences in the UniProt database. Primary sequence motifs are identified by finding sequence conservation blocks within the superfamily alignment. Sequences within clades are then searched for unique sequence motifs within the primary sequence conservation blocks to identify domain specific sequence motifs.

### Example 7—Installing a Desired Nucleotide Edit in a Cell Using Prime Editing Using Expression Vectors

[0533] A populations of host cells is transfected with a first vector that expresses a prime editor in the host cell and a second vector that expresses PEgRNA in the host cell. The PEgRNA has a nucleotide edit and a spacer sequence that bound to a pre-determined genomic location. One-week post-transfection, the population of host cells successfully transfected with the first and second vector are selected and clonally expanded. The individual host cell clone (targeting HEK3) is tested for being installed the nucleotide edit at the pre-determined genomic location using methods described in EXAMPLE 1. The high throughput sequencing step can also be replaced with Sanger Sequencing of the pre-determined genomic location.

### Example 8—Installing a Desired Nucleotide Edit in a Cell Using Prime Editing Using a Purified Prime Editor

[0534] A population of host cells is transfected or electroporated with an mRNA encoding the prime editor and a PEgRNA synthesized ex vivo. The PEgRNA has a nucleotide edit and a spacer sequence that bound to a pre-determined genomic location. One-week post-transfection, the population of host cells successfully transfected with the first and second vector are selected and clonally expanded. The individual host cell clone is tested for being installed the nucleotide edit at the pre-determined genomic location using methods described in EXAMPLE 1. The high throughput sequencing step can also be replaced with Sanger Sequencing of the pre-determined genomic location.

### Example 9—Installing a Desired Nucleotide Edit in a Cell Using Prime Editing Using Purified RNA

[0535] A population of host cells was transfected or electroporated with an mRNA encoding the prime editor and a PEgRNA synthesized ex vivo. The PEgRNA had a nucleotide edit and a spacer sequence that bound to a pre-determined genomic location. One-week post-transfection, the population of host cells successfully transfected with the first and second vector were selected and clonally expanded. The individual host cell clone was tested for being installed the nucleotide edit at the predetermined genomic location using methods described in EXAMPLE 1. The high throughput sequencing step can also be replaced with Sanger Sequencing of the pre-determined genomic location. A graph showing editing at the FANCF site with a SluCas9 prime editor and various PEgRNAs is shown in FIG. 4.

### Example 10— Evaluating Effect of Various Linkers on Prime Editor Efficiency

[0536] This example describes evaluation of the editing efficiency of prime editors comprising different linkers.

[0537] PE variants were constructed by replacing the linker in the PE2 fusion protein (sequences of components shown in Table 15) with each of the linkers in Table 11. Sequences of the linkers are provided in SEQ ID Nos 272-318. Plasmids encoding the PE variants were transfected into HEK293 cells along with pegRNAs targeting three different genomic loci using protocols described in Example 1. Activity of the 47 prime editors each having one of the linkers provided in SEQ ID Nos 272-318, calculated based on the average prime editing efficiency across the 3 endogenous sites were ranked and compared to editing efficiency of PE2, as shown in FIG. 7. Table 11 lists the activity of all 47 prime editors tested; editing efficiency at each of the three genomic loci and average fold increase over the efficiency of PE2 are reported. Of the 47 prime editors tested, seven were further examined by targeting six endogenous loci using the method described in Example 1. FIG. 8 shows the editing efficiency of these seven prime editors comprising in comparison to PE2.

### Example 11—Evaluating Effect of Various DNA Binding Domains on Prime Editor Efficiency

[0538] This example compares the editing efficiency of prime editors comprising different DNA binding domains.

[0539] Prime editors were constructed by replacing the SpCas9 nickase in the PE2 fusion protein (sequences of components shown in Table 15) with a SluCas9 nickase, a sRGN3.1 Cas9 nickase or sRGN3.3 Cas9 nickase. Sequences of the SluCas9 nickase, the sRGN3.1Cas9 nickase and the sRGN3.3Cas9 nickase are provided in SEQ ID Nos 496, 501, 502, and the PE sequences are provided in SEQ ID Nos 505, 511, and 512, respectively. Plasmids encoding the PE variants were transfected into HEK293 cells along with pegRNAs and ngRNA targeting genomic locus as indicated in Table 9 using protocols described in Example 1. One-week post-transfection, the population of successfully transfected host cells were selected and clonally expanded. The individual host cell clone was tested for being installed the nucleotide edit at the pre-determined genomic location using methods described in EXAMPLE 1. The results obtained are summarized in Table 9.

### INCORPORATION BY REFERENCE

[0540] All publications and patent applications mentioned herein are hereby incorporated by reference in their entirety as if each individual publication or patent application was specifically and individually indicated to be incorporated by reference. In case of conflict, the present application, including any definitions herein, will control.

### EQUIVALENTS

[0541] Those skilled in the art will recognize or be able to ascertain using no more than routine experimentation, many equivalents to the specific embodiments of the compositions and methods described herein. Such equivalents are intended to be encompassed by the following claims.

Lengthy table referenced here
US20240067940A1-20240229-T00001
Please refer to the end of the specification for access instructions.

Lengthy table referenced here
US20240067940A1-20240229-T00002
Please refer to the end of the specification for access instructions.

Lengthy table referenced here
US20240067940A1-20240229-T00003
Please refer to the end of the specification for access instructions.

Lengthy table referenced here
US20240067940A1-20240229-T00004
Please refer to the end of the specification for access instructions.

Lengthy table referenced here
US20240067940A1-20240229-T00005
Please refer to the end of the specification for access instructions.

Lengthy table referenced here
US20240067940A1-20240229-T00006
Please refer to the end of the specification for access instructions.

Lengthy table referenced here
US20240067940A1-20240229-T00007
Please refer to the end of the specification for access instructions.

Lengthy table referenced here
US20240067940A1-20240229-T00008
Please refer to the end of the specification for access instructions.

Lengthy table referenced here
US20240067940A1-20240229-T00009
Please refer to the end of the specification for access instructions.

Lengthy table referenced here
US20240067940A1-20240229-T00010
Please refer to the end of the specification for access instructions.

Lengthy table referenced here
US20240067940A1-20240229-T00011
Please refer to the end of the specification for access instructions.

Lengthy table referenced here
US20240067940A1-20240229-T00012
Please refer to the end of the specification for access instructions.

Lengthy table referenced here
US20240067940A1-20240229-T00013
Please refer to the end of the specification for access instructions.

Lengthy table referenced here
US20240067940A1-20240229-T00014
Please refer to the end of the specification for access instructions.

Lengthy table referenced here
US20240067940A1-20240229-T00015
Please refer to the end of the specification for access instructions.

Lengthy table referenced here
US20240067940A1-20240229-T00016
Please refer to the end of the specification for access instructions.

Lengthy table referenced here
US20240067940A1-20240229-T00017
Please refer to the end of the specification for access instructions.

Lengthy table referenced here
US20240067940A1-20240229-T00018
Please refer to the end of the specification for access instructions.

LENGTHY TABLES
The patent application contains a lengthy table section. A copy of the table is available in electronic form from the USPTO web site (https://seqdata.uspto.gov/?pageRequest=docDetail&DocID=US20240067940A1). An electronic copy of the table will also be available from the USPTO upon request and payment of the fee set forth in 37 CFR 1.19(b)(3).

What is claimed is:

1. A prime editing composition that comprises:
a) a DNA binding domain or a polynucleotide encoding the DNA binding domain; and
b) a DNA polymerase domain or a polynucleotide encoding the DNA polymerase domain, wherein the DNA polymerase domain comprises an amino acid sequence with at least 85% sequence identity to a sequence selected from the group consisting of SEQ ID NOs: 5, 6, 13, 15, 16, 17, 18, 21, 22, 130, 131, 204, 230, 232-244, 249-257, 261, 270, 271, 327, 329, 332, 333, 337, 340, 341, 342, 344, 489, 990-1006, 209, 210, 231, and 229.

2. The prime editing composition of claim 1, wherein the DNA polymerase domain comprises an amino acid sequence with at least 85% sequence identity to any one of sequences set forth in SEQ ID NOs: 209, 210, 229-244, 249-257, 261, 270, 271, 329, 990-1006.

3. The prime editing composition claim 1 or 2, wherein the amino acid sequence of the DNA polymerase domain has at least about 86%, 87%, 88%, 80%, 90%, 91%, 92%, 93%, 94%, 95%, 96%, 97%, 98%, 99%, or 100% sequence identity to the selected sequence.

4. The prime editing composition of any one of claims 1-3, wherein the selected sequence is SEQ ID NO: 261.

5. The prime editing composition of any one of claims 1-3, wherein the selected sequence for the DNA polymerase domain is SEQ ID NO:270.

6. The prime editing composition of any one of claims 1-3, wherein the selected sequence for the DNA polymerase domain is SEQ ID NO:16.

7. The prime editing composition of any one of claims 1-3, wherein the selected sequence for the DNA polymerase domain is SEQ ID NO:18.

8. The prime editing composition of any one of claims 1-7, wherein the DNA binding domain comprises a CRISPR associated (Cas) protein.

9. The prime editing composition of claim 8, wherein the Cas protein is a Type II Cas protein.

10. The prime editing composition of claim 9, wherein the Cas protein is a Cas9 protein

11. The prime editing composition of any one of claim 10, wherein the Cas9 protein is a nickase.

12. The prime editing composition of claim 11, wherein the Cas9 protein comprises a mutation in a HNH domain.

13. The prime editing composition of claim 8, wherein the Cas protein is a Type V Cas protein.

14. The prime editing composition of claim 13, wherein the Cas protein is a Cas12a, Cas12b, Cas12c, Cas12d, or Cas12e.

15. The prime editing composition of claim 13, wherein the Cas protein is a Cas12b.

16. The prime editing composition of any one of claims 1-15, wherein the DNA binding domain comprises an amino acid sequence with at least 85% sequence identity to a sequence selected from the group consisting of SEQ ID NOs: 138-146, 494, 858, 1100, 495-503, 1011, 1013.

17. The prime editing composition of claim 16, wherein the amino acid sequence of the DNA binding domain has at least about 86%, 87%, 88%, 80%, 90%, 91%, 92%, 93%, 94%, 95%, 96%, 97%, 98%, 99%, or 100% sequence identity to the selected sequence.

18. The prime editing composition of any one of claims 1-17, wherein the selected sequence for the DNA binding domain is SEQ ID NOs: 495-503, 1011, 1013, or 1100.

19. The prime editing composition of claim 18, wherein the selected sequence for the DNA binding domain is SEQ ID NOs: 495.

20. The prime editing composition of claim 18, wherein the selected sequence for the DNA binding domain is SEQ ID NOs: 496.

21. The prime editing composition of claim 18, wherein the selected sequence for the DNA binding domain is SEQ ID NOs: 501.

22. The prime editing composition of claim 18, wherein the selected sequence for the DNA binding domain is SEQ ID NO: 502.

23. The prime editing composition of any one of claims 1-22, wherein the DNA binding domain is connected to the DNA polymerase domain by a linker.

24. The prime editing composition of any one of claims 1-22, wherein the DNA binding domain is connected to the DNA polymerase domain by a peptide linker in a fusion protein.

25. The prime editing composition of claim 24, wherein the peptide linker comprises a sequence selected from the group consisting of SEQ ID NOs: 272-318, 1014.

26. The prime editing composition of claim 24 or 25, wherein the fusion protein comprises the DNA polymerase and the DNA binding domain from N-terminus to C-Terminus.

27. The prime editing composition of claim 24 or 25, wherein the fusion protein comprises the DNA binding and the DNA polymerase domain from N-terminus to C-Terminus.

28. The prime editing composition of any one of claims 1-27, wherein the DNA polymerase domain, the DNA binding domain, or both comprise one or more nuclear localization signals.

29. The prime editing composition of any one of claims 1-28, wherein the primer editing composition further comprises a solubility-enhancement (SET) domain.

30. The prime editing composition of claim 29, wherein the SET domain comprises an amino acids sequence selected from the group consisting of SEQ ID NOs: 96-124, 137.

31. The prime editing composition of any one of claims 1-30, wherein the sequence identities are determined by Needleman-Wunsch alignment of two protein sequences with Gap Costs set to Existence:
11 Extension: 1 where percent identity is calculated by dividing the number of identities by the length of the alignment.

32. A prime editing composition that comprises a fusion protein, or a polynucleotide encoding the fusion protein, wherein the fusion protein comprises a DNA binding domain and a DNA polymerization domain connected via a peptide linker, wherein the peptide linker comprises an amino acid sequence with at least 80% sequence identity to a sequence selected from the group consisting of SEQ ID NO: 273-318.

33. The prime editing composition of claim 32, wherein the amino acid sequence of the peptide linker has at least about 81%, 82%, 83%, 84%, 85%, 86%, 87%, 88%, 80%, 90%, 91%, 92%, 93%, 94%, 95%, 96%, 97%, 98%, 99%, or 100% sequence identity to the selected sequence.

34. The prime editing composition of claim 32 or 33, wherein the DNA polymerase domain comprises an amino acid sequence with at least 85% sequence identity to SEQ ID NO:856 or SEQ ID NO: 884.

35. The prime editing composition of claim 34, wherein the amino acid sequence of the DNA polymerase domain has at least about 86%, 87%, 88%, 80%, 90%, 91%, 92%, 93%, 94%, 95%, 96%, 97%, 98%, 99%, or 100% sequence identity to SEQ ID NO: 856.

36. The prime editing composition of any one of claims 32-35, wherein the Cas protein is a Type II Cas protein.

37. The prime editing composition of claim 36, wherein the Cas protein is a Cas9 protein

38. The prime editing composition of claim 37, wherein the Cas9 protein is a nickase.

39. The prime editing composition of claim 38, wherein the Cas9 protein comprises a mutation in a HNH domain.

40. The prime editing composition of any one of claims 32-35, wherein the Cas protein is a Type V Cas protein.

41. The prime editing composition of claim 37, wherein the Cas protein is a Cas12a, Cas12b, Cas12c, Cas12d, or Cas12e.

42. The prime editing composition of claim 41, wherein the Cas protein is a Cas12b.

43. The prime editing composition of any one of claims 32-42, wherein the DNA binding domain comprises an amino acid sequence with at least 85% sequence identity to a sequence selected from the group consisting of SEQ ID NOs: 138-146, 494, 858, 1100, 1011, 1013, 495-503.

44. The prime editing composition of claim 43, wherein the amino acid sequence of the DNA binding domain has at least about 86%, 87%, 88%, 80%, 90%, 91%, 92%, 93%, 94%, 95%, 96%, 97%, 98%, 99%, or 100% sequence identity to the selected sequence.

45. The prime editing composition of any one of claims 32-42, wherein the selected sequence for the DNA binding domain is SEQ ID NOs: 495-503, 1011, 1013, 1100.

46. The prime editing composition of claim 45, wherein the selected sequence for the DNA binding domain is SEQ ID NOs: 495.

47. The prime editing composition of claim 45, wherein the selected sequence for the DNA binding domain is SEQ ID NOs: 496.

48. The prime editing composition of claim 45, wherein the selected sequence for the DNA binding domain is SEQ ID NOs: 501.

49. The prime editing composition of claim 45, wherein the selected sequence for the DNA binding domain is SEQ ID NO: 502.

50. The prime editing composition of any one of claims 32-49, wherein the fusion protein comprises the DNA polymerase and the DNA binding domain from N-terminus to C-Terminus.

51. The prime editing composition of any one of claims 32-49, wherein the fusion protein comprises the DNA binding and the DNA polymerase domain from N-terminus to C-Terminus.

52. The prime editing composition of any one of claims 32-51, wherein the DNA polymerase domain, the DNA binding domain, or both comprise one or more nuclear localization signals.

53. The prime editing composition of any one of claims 32-52, wherein the primer editing composition further comprises a solubility-enhancement (SET) domain.

54. The prime editing composition of claim 53, wherein the SET domain comprises an amino acids sequence selected from the group consisting of SEQ ID NOs: 96-124, 137.

55. The prime editing composition of any one of claims 32-54, wherein the sequence identities are determined by Needleman-Wunsch alignment of two protein sequences with Gap Costs set to Existence: 11 Extension: 1 where percent identity is calculated by dividing the number of identities by the length of the alignment.

56. A prime editing composition that comprises:
a) a DNA binding domain, or a polynucleotide encoding the DNA binding domain, wherein the DNA binding domain comprises an amino acid sequence with at least 80% sequence identity to a sequence selected from the group consisting of SEQ ID NOs: 496, 501, 502, 1011, and 1013; and
b) a DNA polymerase domain or a polynucleotide encoding the DNA polymerase domain.

57. The prime editing composition of claim 56, wherein the amino acid sequence of the DNA binding domain has at least about 86%, 87%, 88%, 80%, 90%, 91%, 92%, 93%, 94%, 95%, 96%, 97%, 98%, 99%, or 100% sequence identity to the selected sequence.

58. The prime editing composition of claim 56 or 57, wherein the selected sequence for the DNA binding domain is SEQ ID NOs: 496.

59. The prime editing composition of claim 56 or 57, wherein the selected sequence for the DNA binding domain is SEQ ID NOs: 501.

60. The prime editing composition of claim 56 or 57, wherein the selected sequence for the DNA binding domain is SEQ ID NOs: 502.

61. The prime editing composition of any one of claims 56-60, wherein the DNA polymerase domain comprises an amino acid sequence with at least 85% sequence identity to SEQ ID NO:856 or SEQ ID NO: 884.

62. The prime editing composition of claim 61, wherein the amino acid sequence of the DNA polymerase domain has at least about 86%, 87%, 88%, 80%, 90%, 91%, 92%, 93%, 94%, 95%, 96%, 97%, 98%, 99%, or 100% sequence identity to SEQ ID NO: 856.

63. The prime editing composition of any one of claims 56-62, wherein the DNA binding domain is connected to the DNA polymerase domain by a linker.

64. The prime editing composition of any one of claims 56-62, wherein the DNA binding domain is connected to the DNA polymerase domain by a peptide linker in a fusion protein.

65. The prime editing composition of claim 64, wherein the peptide linker comprises a sequence selected from the group consisting of 272-318, 1014.

66. The prime editing composition of claim 64 or 65, wherein the fusion protein comprises the DNA polymerase and the DNA binding domain from N-terminus to C-Terminus.

67. The prime editing composition of claim 64 or 65, wherein the fusion protein comprises the DNA binding and the DNA polymerase domain from N-terminus to C-Terminus.

68. The prime editing composition of any one of claims 56-67, wherein the DNA polymerase domain, the DNA binding domain, or both comprise one or more nuclear localization signals.

69. The prime editing composition of any one of claims 56-67, wherein the primer editing composition further comprises a solubility-enhancement (SET) domain.

70. The prime editing composition of claim 69, wherein the SET domain comprises an amino acids sequence selected from the group consisting of SEQ ID NOs: 96-124, 137.

71. The prime editing composition of any one of claims 56-70, wherein the sequence identities are determined by Needleman-Wunsch alignment of two protein sequences with Gap Costs set to Existence: 11 Extension: 1 where percent identity is calculated by dividing the number of identities by the length of the alignment.

72. A prime editing composition that comprises:
a) a DNA binding domain or a polynucleotide encoding the DNA binding domain; and
b) a DNA polymerase domain, or a polynucleotide encoding the DNA polymerase domain, wherein the DNA polymerase domain comprises an amino acid sequence with at least 85% sequence identity to a sequence selected form the group consisting of SEQ ID NOs: 81, 91, 82, 84.

73. The prime editing composition of claim 72, wherein the amino acid sequence of the DNA polymerase domain has at least about 86%, 87%, 88%, 80%, 90%, 91%, 92%, 93%, 94%, 95%, 96%, 97%, 98%, 99%, or 100% sequence identity to the selected sequence.

74. The prime editing composition of claim 72 or 73, wherein the selected sequence for the DNA polymerase domain is SEQ ID NO: 81.

75. The prime editing composition of claim 72 or 73, wherein the selected sequence for the DNA polymerase domain is SEQ ID NO: 91

76. The prime editing composition of claim 72 or 73, wherein the selected sequence for the DNA polymerase domain is SEQ ID NO: 82.

77. The prime editing composition of claim 72 or 73, wherein the selected sequence for the DNA polymerase domain is SEQ ID NO: 84.

78. The prime editing composition of any one of claims 72-77, wherein the DNA binding domain comprises a CRISPR associated (Cas) protein.

79. The prime editing composition of claim 78, wherein the Cas protein is a Type II Cas protein.

80. The prime editing composition of claim 79, wherein the Cas protein is a Cas9 protein

81. The prime editing composition of claim 80, wherein the Cas9 protein is a nickase.

82. The prime editing composition of claim 81, wherein the Cas9 protein comprises a mutation in a HNH domain.

83. The prime editing composition of claim 82, wherein the Cas protein is a Type V Cas protein.

84. The prime editing composition of claim 83, wherein the Cas protein is a Cas12a, Cas12b, Cas12c, Cas12d, or Cas12e.

85. The prime editing composition of claim 83, wherein the Cas protein is a Cas12b.

86. The prime editing composition of any one of claims 72-85, wherein the DNA binding domain comprises an amino acid sequence with at least 85% sequence identity to a sequence selected from the group consisting of SEQ ID NOs: 138-146, 494, 858, 1100, 1011, 1013, 495-503.

87. The prime editing composition of claim 86, wherein the amino acid sequence of the DNA binding domain has at least about 86%, 87%, 88%, 80%, 90%, 91%, 92%, 93%, 94%, 95%, 96%, 97%, 98%, 99%, or 100% sequence identity to the selected sequence.

88. The prime editing composition of any one of claims 72-87, wherein the selected sequence for the DNA binding domain is SEQ ID NOs: 495-503, 1011, 1013, 1100.

89. The prime editing composition of claim 88, wherein the selected sequence for the DNA binding domain is SEQ ID NOs: 495.

90. The prime editing composition of claim 88, wherein the selected sequence for the DNA binding domain is SEQ ID NOs: 496.

91. The prime editing composition of claim 88, wherein the selected sequence for the DNA binding domain is SEQ ID NOs: 501.

92. The prime editing composition of claim 88, wherein the selected sequence for the DNA binding domain is SEQ ID NO:502.

93. The prime editing composition of any one of claims 72-92, wherein the DNA binding domain is connected to the DNA polymerase domain by a linker.

94. The prime editing composition of any one of claims 72-92, wherein the DNA binding domain is connected to the DNA polymerase domain by a peptide linker in a fusion protein.

95. The prime editing composition of claim 94, wherein the peptide linker comprises a sequence selected from the group consisting of 272-318, 1014.

96. The prime editing composition of claim 94 or 95, wherein the fusion protein comprises the DNA polymerase and the DNA binding domain from N-terminus to C-Terminus.

97. The prime editing composition of claim 94 or 95, wherein the fusion protein comprises the DNA binding and the DNA polymerase domain from N-terminus to C-Terminus.

98. The prime editing composition of any one of claims 72-97, wherein the DNA polymerase domain, the DNA binding domain, or both comprise one or more nuclear localization signals.

99. The prime editing composition of any one of claims 72-98, wherein the primer editing composition further comprises a solubility-enhancement (SET) domain.

100. The prime editing composition of claim 99, wherein the SET domain comprises an amino acids sequence selected from the group consisting of SEQ ID NOs: 96-124, 137.

101. The prime editing composition of any one of claims 72-100, wherein the sequence identities are determined by Needleman-Wunsch alignment of two protein sequences with Gap Costs set to Existence: 11 Extension: 1 where percent identity is calculated by dividing the number of identities by the length of the alignment.

102. A prime editing composition comprising
a) a DNA binding domain or a polynucleotide encoding the DNA binding domain, and
b) a reverse transcriptase (RT) domain or a polynucleotide encoding the RT domain, wherein the RT domain is from a naturally occurring fusion between a Type III CRISPR system protein and a reverse transcriptase, and wherein the DNA binding domain is heterologous to the RT domain.

103. The prime editing composition claim 102, wherein the RT domain is from a naturally occurring Cas1-RT fusion protein.

104. The prime editing composition of claim 102 or 103, wherein the RT domain comprises an amino acid sequence with at least 85% sequence identity to a sequence selected from the group consisting of SEQ ID NOs: 345, 129-136, 396, 533-846.

105. The prime editing composition of claim 104, wherein the amino acid sequence of the RT domain has at least about 86%, 87%, 88%, 80%, 90%, 91%, 92%, 93%, 94%, 95%, 96%, 97%, 98%, 99%, or 100% sequence identity to the selected sequence.

106. The prime editing composition of claim 104 or 105, wherein the selected sequence for the RT domain is SEQ ID NO: 209.

107. The prime editing composition of claim 104 or 105, wherein the selected sequence for the RT domain is SEQ ID NO: 210.

108. The prime editing composition of claim 106 or 107, wherein the RT domain is fused directly to the DNA binding domain.

109. The prime editing composition of claim 108, wherein the RT domain is fused to the N-terminus of the DNA binding domain.

110. The prime editing composition of claim 108, wherein the RT domain is fused to the C-terminus of the DNA binding domain.

111. The prime editing composition of claim any one of claims 102-110, wherein the DNA binding domain comprises a CRISPR associated (Cas) protein.

112. The prime editing composition of claim 111, wherein the Cas protein is a Type II Cas protein.

113. The prime editing composition of claim 112, wherein the Cas protein is a Cas9 protein

114. The prime editing composition of claim 113, wherein the Cas9 protein is a nickase.

115. The prime editing composition of claim 114, wherein the Cas9 protein comprises a mutation in a HNH domain.

116. The prime editing composition of claim 111, wherein the Cas protein is a Type V Cas protein.

117. The prime editing composition of claim 116, wherein the Cas protein is a Cas12a, Cas12b, Cas12c, Cas12d, or Cas12e.

118. The prime editing composition of claim 117, wherein the Cas protein is a Cas12b.

119. The prime editing composition of any one of claims 102-118, wherein the DNA binding domain comprises an amino acid sequence with at least 85% sequence identity to a sequence selected from the group consisting of SEQ ID NOs: 138-146, 494, 858, 1100, 1011, 1013, 495-503.

120. The prime editing composition of claim 119, wherein the amino acid sequence of the DNA binding domain has at least about 86%, 87%, 88%, 80%, 90%, 91%, 92%, 93%, 94%, 95%, 96%, 97%, 98%, 99%, or 100% sequence identity to the selected sequence.

121. The prime editing composition of any one of claims 119-120, wherein the selected sequence for the DNA binding domain is SEQ ID NOs: 495-503, 1100, 1011, 1013.

122. The prime editing composition of claim 121, wherein the selected sequence for the DNA binding domain is SEQ ID NOs: 1011.

123. The prime editing composition of claim 121, wherein the selected sequence for the DNA binding domain is SEQ ID NOs: 1013

124. The prime editing composition of claim 121, wherein the selected sequence for the DNA binding domain is SEQ ID NOs: 496.

125. The prime editing composition of claim 121, wherein the selected sequence for the DNA binding domain is SEQ ID NOs: 501.

126. The prime editing composition of claim 121, wherein the selected sequence for the DNA binding domain is SEQ ID NO: 502.

127. The prime editing composition of any one of claims 102-126, wherein the RT domain, the DNA binding domain, or both comprise one or more nuclear localization signals.

128. The prime editing composition of any one of claims 102-127, wherein the primer editing composition further comprises a solubility-enhancement (SET) domain.

129. The prime editing composition of claim 128, wherein the SET domain comprises an amino acids sequence selected from the group consisting of SEQ ID NOs: 96-124, 137.

130. The prime editing composition of any one of claims 102-129, wherein the sequence identities are determined by Needleman-Wunsch alignment of two protein sequences with Gap Costs set to Existence: 11 Extension: 1 where percent identity is calculated by dividing the number of identities by the length of the alignment.

131. A prime editing composition that comprises:
a) a DNA polymerase domain or a polynucleotide encoding the DNA polymerase domain, wherein the DNA polymerase domain comprises an amino acid sequence having at least 85% identity to SEQ ID NO: 856 or 884.
b) a DNA binding domain or a polynucleotide encoding the DNA binding domain, wherein the DNA binding domain comprises an amino acid sequence having at least 85% identity to SEQ ID NO: 1011 or 1013; and
c) a solubility-enhancement (SET) domain or a polynucleotide encoding the SET domain, wherein the SET domain comprises an amino acid sequence with at least 80% sequence identity to an amino acid sequence selected from the group consisting of SEQ ID NOs: 96-124, 137.

132. The prime editing composition of claim 131, wherein the amino acid sequence for the SET domain has at least 81%, 82%, 83%, 84%, 85%, 86%, 87%, 88%, 80%, 90%, 91%, 92%, 93%, 94%, 95%, 96%, 97%, 98%, 99%, or 100% sequence identity to the selected sequence.

133. The prime editing composition of claim 131 or 132, wherein the selected sequence for the SET domain is SEQ ID NO: 102.

134. The prime editing composition of claim 131 or 132, wherein the selected sequence for the SET domain is SEQ ID NO: 137

135. The prime editing composition of any one of claims 131-134, wherein the amino acid sequence for the DNA polymerase domain has at least 86%, 87%, 88%, 80%, 90%, 91%, 92%, 93%, 94%, 95%, 96%, 97%, 98%, 99%, or 100% sequence identity to the selected sequence.

136. The prime editing composition of claim 135, wherein the selected sequence for the DNA polymerase domain is 856.

137. The prime editing composition of claim 135, wherein the selected sequence for the DNA polymerase domain is 884.

138. The prime editing composition of any one of claims 131-137, wherein the amino acid sequence for the DNA binding domain has at least 86%, 87%, 88%, 80%, 90%, 91%, 92%, 93%, 94%, 95%, 96%, 97%, 98%, 99%, or 100% sequence identity to the selected sequence.

139. The prime editing composition of claim 135, wherein the selected sequence for the DNA binding domain is SEQ ID NO: 1011.

140. The prime editing composition of claim 135, wherein the selected sequence for the DNA binding domain is SEQ ID NO: 1013.

141. The prime editing composition of any one of claims 131-140, wherein the SET domain is fused to the DNA polymersase via an SGGS linker.

142. The prime editing composition of any one of claims 131-141, wherein the DNA binding domain is connected to the DNA polymerase domain by a linker.

143. The prime editing composition of any one of claims 131-142, wherein the DNA binding domain is connected to the DNA polymerase domain by a peptide linker in a fusion protein.

144. The prime editing composition of claim 143, wherein the peptide linker comprises a sequence selected from the group consisting of SEQ ID NOs: 272-318, 1014.

145. The prime editing composition of claim 143 or 144, wherein the fusion protein comprises the DNA polymerase and the DNA binding domain from N-terminus to C-Terminus.

146. The prime editing composition of claim 143 or 144, wherein the fusion protein comprises the DNA binding and the DNA polymerase domain from N-terminus to C-Terminus.

147. The prime editing composition of any one of claims 131-146, wherein the DNA polymerase domain, the DNA binding domain, the SET domain, or a combination thereof comprise one or more nuclear localization signals.

148. The prime editing composition of claim 143 or 144, wherein the fusion protein comprises a nuclear localization signal, the DNA binding domain, the peptide linker, the DNA polymerase domain, the SGGS linker, the SET domain, and a second nuclear localization signal from N-terminus to C-terminus.

149. The prime editing composition of any one of claims 131-148, wherein the sequence identities are determined by Needleman-Wunsch alignment of two protein sequences with Gap Costs set to Existence: 11 Extension: 1 where percent identity is calculated by dividing the number of identities by the length of the alignment.

150. The prime editing composition of any one of claims 1-149, further comprising a prime editing guide RNA (PEgRNA), or a polynucleotide encoding the PEgRNA.

151. The prime editing composition of any one of claims 1-150, further comprising a nick guide RNA (ngRNA), or a polynucleotide encoding the ngRNA.

152. A vector comprising one or more of the polynucleotides of the prime editing compositions of any one of claims 1-149.

153. The vector of claim 152, wherein the vector is a AAV vector.

154. The vector of claim 152, wherein the vector is an lipid nanoparticle (LNP).

155. A pharmaceutical composition comprising the prime editing composition of any one of claims 1-151, or the vector of any one of claims 152-154.

156. The pharmaceutical composition of claim 155, further comprising a pharmaceutically acceptable excipient.

157. An engineered reverse transcriptase (RT) that comprises an amino acid sequence with at least 85% sequence identity to an amino acid sequence selected from the group consisting of SEQ ID NOs: 81-95.

158. The engineered RT of claim 150, wherein the amino acid sequence for the engineered RT has at least 86%, 87%, 88%, 80%, 90%, 91%, 92%, 93%, 94%, 95%, 96%, 97%, 98%, 99%, or 100% sequence identity to the selected sequence.

159. The engineered RT of claim 150 or 151, wherein the selected sequence for the engineered RT is SEQ ID NO: 84.

160. The engineered RT of claim 150 or 151, wherein the selected sequence for the engineered RT is SEQ ID NO: 82.

161. The engineered RT of claim 150 or 151, wherein the selected sequence for the engineered RT is SEQ ID NO: 81

162. The engineered RT of claim 150 or 151, wherein the selected sequence for the engineered RT is SEQ ID NO: 91

163. The engineered RT of any one of claims 150-155, wherein the sequence identities are determined by Needleman-Wunsch alignment of two protein sequences with Gap Costs set to Existence: 11 Extension: 1 where percent identity is calculated by dividing the number of identities by the length of the alignment.

164. A prime editing composition that comprises a fusion protein, or a polynucleotide encoding the fusion protein, wherein the fusion protein comprises a DNA binding domain and a DNA polymerization domain connected via a peptide linker, wherein the fusion protein comprises an amino acid sequence with at least 80% sequence identity to a sequence selected from the group consisting of SEQ ID NO: 504, 939-987, 1011, 1012, 1013, 1007-1010, 504-513, 514-521.

165. The prime editing composition claim 164, wherein the amino acid sequence of the DNA polymerase domain has at least about 86%, 87%, 88%, 80%, 90%, 91%, 92%, 93%, 94%, 95%, 96%, 97%, 98%, 99%, or 100% sequence identity to the selected sequence.

166. The prime editing composition of any one of claims 164-165, wherein the selected sequence is SEQ ID NO: 940.

167. The prime editing composition of any one of claims 164-165, wherein the selected sequence is SEQ ID NO: 941.

168. The prime editing composition of any one of claims 164-165, wherein the selected sequence is SEQ ID NO: 976.

169. The prime editing composition of any one of claims 164-165, wherein the selected sequence is SEQ ID NO: 977.

170. The prime editing composition of any one of claims 164-165, wherein the selected sequence is SEQ ID NO: 505.

171. The prime editing composition of any one of claims 164-165, wherein the selected sequence is SEQ ID NO: 511.

172. The prime editing composition of any one of claims 164-165, wherein the selected sequence is SEQ ID NO: 512.

173. The engineered RT of any one of claims 150-155, wherein the sequence identities are determined by Needleman-Wunsch alignment of two protein sequences with Gap Costs set to Existence: 11 Extension: 1 where percent identity is calculated by dividing the number of identities by the length of the alignment.

174. A vector comprising one or more of the polynucleotides of the prime editing compositions of any one of claims 164-173.

175. The vector of claim 174, wherein the vector is a AAV vector.

176. The vector of claim 175, wherein the vector is an lipid nanoparticle (LNP).

177. A pharmaceutical composition comprising the prime editing composition of any one of claims 164-173, or the vector of any one of claims 174-176.

The application's sequence listing, which the Patent Office published only in electronic form, follows.

SEQUENCE LISTING (1102 sequences)

SEQ ID NO: 1 - protein, 762 aa, Rhodomonas salina
MHAQLLRSIKARFPDCTRKSVVRSGDESPLRTPGKFEKAWRAKVTTRRLTKLIHNGCIILFGVRYHPGKGTSTSWSPFRIYWRPIATGVSRSNQDTFTSVDIMQRAKVTYFGGCGNMRYPTARKSHGYGASIIGFTRREAGLRLYTQNSAISDSSMTSCGIISKHRKFNKDKNFVNKRLINIIGDVQTLIVAYEFVKSKPGQMVKGSIDSTLDDIDLAWIKSISKVIKAGKFKFIPSRRIYVSKTGCKERRPIMTGFPRDKLVQKAIQLVLEPIYENVFLENSHGFRPARGCHTALKSIKQGFHGVTWVIESDIASCFSSVNHEVLLSIIKERIKCVKTLALIRNLLESGYVDLGAFCKSKLGIPQGSSLSPLLCNIYLHKFDTFMYELKQRFVYTSSKDPRINPAYKRLQRQIQNTPGLVEKSKFIQELRKTPSKDLFDPKYRRLFYIRYADDFSIGITGQKKDAVEILDQAKIFLSEELKMDLKESKIRVVHLKKQSIFFLGTTIYGISCVEKPMRTVKHSNWKTSIKIRVTPRVGLHAPMKVLLEKLLQNKFVKRDKEGIFKPTALGKLVNFDHADIIGYYNSVARGIMNYYSFVDNYSRLGSIVKYYLLHSCALTLALKYKLRFKSKAFKRFGGKLKCPDTKKEFFIPKNFFRTEKFSINPPDTEQVISKRWNNKLTKSSLFKACVICGTTPAEMYHVCKTRDLRNKYKTKKLDFFKFQMASFNQKQVPLCQFHHKSLHQGKLSEADKVAFREGITNL

SEQ ID NO: 2 - protein, 633 aa, Novosphingobium aromaticivorans
MLPDTIERAVRSLPTVIRSGRKVNGLYRLLKSPLLWEHAYQRIAPNKGAMTPGVDGQTFDGFSPDKVRSIIERLANGTYRPQPARRVYIPKANGQKRPLGVPTTEDKLVQEVVRTILEQIYEPLFSRHSHGFRPKRSCHTALESIRAIWTGVKWLIDVDVVGFFDNIDHDVLVSLLEKRIADRRFVRLIRGLLKAGYVEDWVFHKTYSGTPQGGVVSPMLANIYLHELDMFMQAKMAGFDKGKQRSPSPDARRIRNRLSYVRRTVDQLRAKGRGDDPRVTSFLEEIGRLKAERLAVPASDAFDPNYRRLRYCRYADDFIIGVTGSKSEARQIMEEVRTYLSDHLKLAVSAEKSGIHKASDGARFLGYEVRTMTNPNPHKAIFDGRPAVRRGLADRMKLLVPRDRVVRFVNSKEWGDYDSFRPVGRAALRFASDVEIVLAYNAEWRGFANYYAIADDVKRKLNKAGYFALLSCVKTIAGKHRTSARRVFAKLRRGTDFYISYEVGDTTRTIKLWQLKDLQRHTRTWGGIDIPSSAKFVFSRTELVERLNARECERCGSNDQPCEVHHVRRIGELQHAGFSRHMAAARQRKRMVLCSRCHNDVHAGQPTDRQRRTARSRGEPNALKGARSVRRGA

SEQ ID NO: 3 - protein, 753 aa, Arabidopsis thaliana
MASKETGMFSLAGELASLVEESSSHVDDDSKPRSRMELKRSLELRLKKRVKEQCINGKFSDLLKKVIARPETLRDAYDCIRLNSNVSITERNGSVAFDSIAEELSSGVFDVASNTFSIVARDKTKEVLVLPSVALKVVQEAIRIVLEVVFSPHFSKISHSCRSGRGRASALKYINNNISRSDWCFTLSLNKKLDVSVFENLLSVMEEKVEDSSLSILLRSMFEARVLNLEFGGFPKGHGLPQEGVLSRVLMNIYLDRFDHEFYRISMRHEALGLDSKTDEDSPGSKLRSWFRRQAGEQGLKSTTEQDVALRVYCCRFMDEIYFSVSGPKKVASDIRSEAIGFLRNSLHLDITDETDPSPCEATSGLRVLGTLVRKNVRESPTVKAVHKLKEKVRLFALQKEEAWTLGTVRIGKKWLGHGLKKVKESEIKGLADSNSTLSQISCHRKAGMETDHWYKILLRIWMEDVLRTSADRSEEFVLSKHVVEPTVPQELRDAFYKFQNAAAAYVSSETANLEALLPCPQSHDRPVFFGDVVAPTNAIGRRLYRYGLITAKGYARSNSMLILLDTAQIIDWYSGLVRRWVIWYEGCSNFDEIKALIDNQIRMSCIRTLAAKYRIHENEIEKRLDLELSTIPSAEDIEQEIQHEKLDSPAFDRDEHLTYGLSNSGLCLLSLARLVSESRPCNCFVIGCSMAAPAVYTLHAMERQKFPGWKTGFSVCIPSSLNGRRIGLCKQHLKDLYIGQISLQAVDFGAWR

SEQ ID NO: 4 - protein, 548 aa, Bacillus cereus
MNTSERASAHVSYTNWKAVQMYVTKLRQRIYRAEQLQQQRKVRKLQRLLMRSEANLLLSIRRVTQQNKGKRTAGVDEHTALSRRERNLLYEQLKKLNTLQHRPKPAKRIYIVKKNGKLRPLGIPTIKDRVYQNIVRNALEPQWEARFEAISYGFRPKRSTHDAIRSIFNRINGGTKKKWIVEGDFQGCFDHLNHEWILKQTSYFPGRKLLKRWLKMGYMEQSFFAETQEGTPQGGIISPLLANIALHGMEETLGITYKKNYKANDSYIMNPACKFTLIRYADDFVVLTETKEQALSVYMRLRPYLKDRGLELSPEKTKVTHIEEGFEFLGFLIRQYQTEQGNKLFIKPSKGSRQKAKKKIGDTLRVMRGQPIGEIIRVLNPIIRGYGQYWKHVVSKKIFGTMDSYIYWRIGKHLRQLHPKKSWKWIYARYYRHPHHGGNAWTPTCPKTNIQLLHMSWIKIERHNMVKFKNSPDDPTLKEYWEKRDRKVFDTENTMDRMKLARKQGYRCAICKTPLQNGEKVVVKDMPVPQHLILSNLNLKLVHLPCLY

SEQ ID NO: 5 - protein, 470 aa, Thermoanaerobacter ethanolicus
MDSKDMQRLQTTQQRGYPLDREMEFQKTTEVHSISSASRDGRNEVQRYTSKMLEMIVERGNMRAAYKRVVANKGSHGVDGMEVDELLPYLKENWPTIKQQLLEGKYKPQPVRRVEIPKPDGGVRLLGIPTALDRLIQQAIAQILNRVYNHTFSDSSYGFRPGRSAKDAIKAAEAYINEGYTWVVDMDLEKFFDRVNHDIIMSKLEKRIGDKRVLKLIRRYLESGVMINGVKVSTEEGTPQGGPLSPLLANIMLDELDKELEKRGHKFCRYADDCNIYVKSRSAGNRVMKSIKKFIESKLKLKVNEAKSAVDRPWRRKFLGFSFYTKENEVRIRIHEKSIKRFKEKVREITNRNKGISMENRIKRLNQITTGWVNYFGLADAKSIMKTLDEWIRRRLRACIWKQWKKIKTKHDNLVKLGVEEQKAWEYANTRKGYWRISNSPILNKTLTNKYFESIGYKSLSQRYLIVHNS

SEQ ID NO: 6 - protein, 420 aa, Bacillus thuringiensis
MQETKPFGISKNVVMMAFERVKANKGTYGMDEQSIEMYEMDLKNNLYKLWNRMSSGSYFPKPVKAVAIPKKNGGTRTLGIPTVEDRVAQMVAKLYFEPNVERLFYEDSYGYRPNKSAIQAIEATRKRCWRKDWVLEFDIKGLFDNIRHDYLIEMVKRHTNQEWVTLYVQRWLITPFQMEDGTLIERTAGTPQGGVISPVLANLFLHYTFDDFMVKEFSSIPWARYADDGIAHCTSLKQAKYLQRRLEERFKLFGLELNLEKTKIAYCKDDDRQLSYPNTSFDFLGYTFRPRHAKNKHGKFFTNFSPAIADKAKKAIRKEVRSWRLQLKADKTLQDISNMFNKKIQGWINYYGHFYKSEMYSVLRYINSSLIKWVRRKYKKRKHRRKAEYWLGTIAQRERKLFAHWKYGILPATNNGSRMS

SEQ ID NO: 7 - protein, 427 aa, Desulfovibrio vulgaris
MKKEKIDGWYKSGRNYLHFDEKVSFEKASRIVKNPRKVASWNFFPFLQTTVKTSKITRNDEGEIVPKNKSRPISYAAHTDSHIYSYYATLLQPIYEKFIEKHGLGTNITGFRKLDGECNIDFAHRAFNAIRSMTPCIALSFDVKSFFDEIDHSILKQAWCTILEKTLLPEDHFAIFKSLTTYSYVDRDDAFNAFGITKSSKKNGIRRICNPLEFRSILRPAGLIKRNKNSYGIPQGSPISGLLSNIYLFEFDKAISYFASDTKSHYYRYCDDIIIICNEEHEELFKNLVSDELKKLNLRTNEKNVIRKFFMGCDGPECDKPIQYLGFVFDGKRAVIRSASHSRFLKRMRKAVSLAKQTKRKRDKIRTSKGLETTSLHKKKLYTKYSYLGNRNYISYAHRAAKIMDEDAIKKQVKPLWKRLRQEIESD

SEQ ID NO: 8 - protein, 316 aa, unidentified
  REGION 1..316: note = Description of Unknown: Candidatus Kuenenia stuttgartiensis sequence
MSMKEFALNLSALYSAFDAVKENHGCAGADGVTIERYEGNLDLNLRIMRKELTEQTYFPLPLLRILVDKGNGEARALCIPSVRDRIVQAAVLQLIEPVLEKEFEECSFAYRKGRSVKQAVYKVREYYEQGYQWVVDADIDAFFDSVDYSLLLLKFKCYIHDPCIQNLVGLWLKGEVWDGKTVTTLKKGIPQGSPISPILANLYLDEFDEELTRNGYKLVRFSDDFIILCKNSGMAKESLKLTKKILEKLLLELDEEQVINFDQGFKFLGVIFVKSMIMVPFDRPKKERKVLFFPKPLDLEVYFKQRKQGKIWQTST

SEQ ID NO: 9 - protein, 383 aa, Shewanella putrefaciens
MKKYSLTPAMLEVCKEYNFFSDVSGFMPLTSENIKEIKIGKKFAYSHQDNNKPTHQKLSKIIFENFLSNIPLNQSAIAYVKKKSYFDFIEPHRNNYFFLRIDLKDFFHSISEDLLKRTLSDYFSSESLSETIKQSNIDAIFTFLTVNLKSDSSNVKFLDKKILPIGFPLSPNLANIVFRKTDLLLEKLCDMHGVTYTRYADDMLFSSRGIMEKNLLFRKNNNYKKPYIHSDNFLSEIKYLVSIDGFFINHNKTIKSVNTLSLNGYTISGTNFPDIEGKIRLSNKKTKIIEKVIHEININPDDKVTFEKCFKKEFPKPKYEKNRDNFINNLCTIKINQKLLGYRSYLISIIKFNNKFNCISESSEDKYNTLLSKIENVIKKRIK

SEQ ID NO: 10 - protein, 343 aa, Chromohalobacter salexigens
MEHTYYPHHPINSLKALNRALGIDEDEIFHALSNISYKEVPIKKKDGAIRVTYDATSALKVVQKKVTSNIFHRVNFPHYIHGCIRDTKTPRNIYTNAYPHAGCKQVILCDIKDFFPSIKAKTVFFIFRHCLGFSPNVSQRLTDLCTYNGTLPQGASTSSYIANLAFWDVEPLLVKKLESLGLTYTRFADDITISAKKSISKSLKTQVLHEVRRTIRKRGCSLKKNKTIVLKRSQVIIGKDKETQETTRNPITVTSLSIHHSSVTISKVERRKVRAFVDKLSKTEFNRVSYHEWCRRYSSAMGRVSRLISCGHKEGEPLKQRLKALKDEHKKFHQRSSNVSGRK

SEQ ID NO: 11 - protein, 309 aa, Leptospira borgpetersenii
MHTVHGNFFYKLSNKKRLAKYLRVSLKELLTLQDDSNYKVWSEEGENGKLREIQEPVYKLKSVHSKIQKSLASIVAPEFLFSGVKGKSNISNASYHKDGNYIVTADIQSFYINCNKEHIFRFFKYTLRTSDDIARILTELCCYKTFLPTGSPVSQILAYHSYARIFNRIDAFSKANDITFSLYVDDITLSSEKSIHRYILKTISKLLKSVNLSLKKEKTKFYNKNSYKIVTGCAISPDHILLRPNKIMRKIDNKLCKHEKDLSKLTPKEIESVLGQVIYLRSITPNSYPQLFKSLSLMKTEEKIKQRPL

SEQ ID NO: 12 - protein, 302 aa, Aeromonas hydrophila
MDKKAIYIERFLVYAPRKYRVYKIPKRKHGSRVIAQPTAELKKLQRAFINRSKIPVHECAMAYKDGVSIKDNAQLHSTNTFFLSMDFENFFNSITPDLLWGVFNKFGKVISPNEKLWLSKLLFWCPSKKNSNKLILSVGAPSSPKVSNFCMYFFDEYISTYCQDRNITYSRYADDLSFSTNEKDILFQIPGVVKETLLKLFGRDITINNSKTVFSSKAHNRHVTGITITNEGELSLGREKKRYIKHLIFRFKNGLLDVSDVSYLRGILSFAFYIEPAFKTSMVKKYTKATIDSIFNGVDDGK

SEQ ID NO: 13 - protein, 430 aa, Pelotomaculum thermopropionicum
MKILKIPKKNGKYRTIYAPDAEEKRALRGIVGILNQKCQHVCDPAAVHGFMPLKSPVTNALAHVGRKYTVSFDLEDFFDTVTPEKASKCLTKEQKELVFVDGAARQGLPTSPAVANLAATDMDRAILKWIEKSGKSVVYTRYADDLAFSFDDPELIPVIQKKVPEIIRRSGFRVNTDKTTVQAAVAGRRIICGVAVDDEGVHPTREVKRRLRAAKHQGNELEAAGLEEWCKLKVPSGKRQKARETTEGLDELRKHWKLRKIDMAKAVSRKVIPEKDLGDNCYITNDPAYFMGMSTFTTGWKSCMRMDGGEYRKGVMAWLALPGTSVAVFLSDRTMNIAGVERRRMRARCLVHKLENGQLVYDRLYGNPDDTPVLVKKLEEAGIRPIREFAGKGIYVEGDVPASMAMPYCDNLWEEKINIKSGKRVVRFYV

SEQ ID NO: 14 - protein, 298 aa, unidentified
  REGION 1..298: note = Description of Unknown: Deltaproteobacterium MLMS-1 sequence
MSITDLALAIGVSPRLITSFIHAPGNHYRHFNIGKRGGGERVISSPRTFLKVVQYWILDYLLHPLPCHPNCHSYQKGKSILSNSLPHVGKKYVANIDILNFFPSITERMVFDFLKKNNFGEQLSKSLSRIVTLNNGLPQGAPTSPVISNSFLNKFDEIISEKSLLLDVSFTRYADDITISGDRKENIISLIEISEHYLNSIGLKLNNKKTRIASKGGQQRVTGIVVNKTAQPPRKFRKNIRSMFHHAGMKPELFVDKINVLRGYVSYLQSFPNLYDGNEIKKYKKICATIQANFVQKQ

SEQ ID NO: 15 - protein, 349 aa, Fusobacterium nucleatum
MEWIEYREQFITTAKKASKNSGYIKKNLKYAEKLYNQKLPIIYNASHFSKLVGYSLQYLYAASNDSSKFYREFEIKKKNGGSRKISEPLPSLKEIQKWILENILNKIQKEKVSKYAKAYQKKISIKENVKFHRGQKKVLSLDITNFFLNIKIDKIYEVFYNLGYSKSLSTLFSNLCTLNYSLPQGAPTSPILSNIVMLNFDNEIEKIVLEKRIRYTRYADDMTFSGDFLEKEIIKYVKENLNKIGLKINNKKTRVRKNWQQQMVTGIIVNEKIQISRKKRDELRQTMYYIEKYGIDSFLKYKGIKNKVYYLSHLKGILEYAYFINKNDKKLFNYIEYLKNNFFKEKSSI

SEQ ID NO: 16 - protein, 257 aa, Salmonella enterica
MTIEVQRWEDKFEIKPGVWVYVPSVEARKVGGKILQAVRNKWIPPLYFYHLRTGGHLKAARLHLKSDFFAVVDIKQFFQSTSRSRITRDLKSYFTYSQAREISTFSTVRNLSHSPHKHVLPFGFVQSPILATLCLDKSYFGSLLRRLNKHHDLKLSVFMDDVIISSNNLAQLQAAYDEALVAMRKSGYQANMSKTQAPSSKISVFNLTLSKGVMKVTSQKMSDFLIDFYSSNYEPHRIGVKNYVEAVNPGQAKLFKL

SEQ ID NO: 17 - protein, 381 aa, Idiomarina baltica
MNRWSSRAFKKHNSDKPAAVVETAALYGRKIQTSCPELPVIFTLNHLALKSGVPYNNLRSFVDRTIERPYRSFTLRKNGLGSNPRKFRVIKVPQQDLKKAQQFINQNILSKMEPHECSVAFSPGSKIYDAASEHCNARWLLKFDIVSFFESITEKSVYRVFRRYNYPALLSFEMARICTALKARPPINWGGAPPNIRYRTIPGYSNKNLGTLPQGAPTSPMLANLVSYNLDRRLKLIADAYNCHYSRYADDITFSTDSSLSRGEVSRIIAMINSTLREYGHTMNKAKTTIAPPGARKFYLGMNIHGDSPQLRKSFKRKLKQHLFFCEKNSVGPEKHSKHLGFVSVIGFKNHLRGLINYANQVDTVFGENCMKRFQSIDWPL

SEQ ID NO: 18 - protein, 338 aa, Staphylococcus aureus
MEKIENEIVNKTYLAINSLEELRNMIGIKSDYFYKCLYVNDHFYNVIKIPKRKKDEYRELMIPNMALKNIQRWILDNVLYRRQVHKCATGFVPRKSIVNNAIPHVGQKYILKMDIENFFPSITFKQVRKIFSEMGYKFELATALANLCTVNNQLPQGAPTSPYIANIIFYNIDKRIFSYCQKNNLRYTRYADDITISGSNKVSFSKEIIREIVNQYNFRINESKTIMFKPGDRKKVTGIIVNEKISVPKTLIREVRKQIYFVNKFGLEEHLIRNNYSLDYEQQFIMSIYGKISFIKMIDFKKGVSLQKKFNEVLGNIESSNMYRDNIDFDDIELHWIN

SEQ ID NO: 19 - protein, 485 aa, Myxococcus xanthus
MTARLDPFVPAASPQAVPTPELTAPSSDAAAKREARRLAHEALLVRAKAIDEAGGADDWVQAQLVSKGLAVEDLDFSSASEKDKKAWKEKKKAEATERRALKRQAHEAWKATHVGHLGAGVHWAEDRLADAFDVPHREERARANGLTELDSAEALAKALGLSVSKLRWFAFHREVDTATHYVSWTIPKRDGSKRTITSPKPELKAAQRWVLSNVVERLPVHGAAHGFVAGRSILTNALAHQGADVVVKVDLKDFFPSVTWRRVKGLLRKGGLREGTSTLLSLLSTEAPREAVQFRGKLLHVAKGPRALPQGAPTSPGITNALCLKLDKRLSALAKRLGFTYTRYADDLTFSWTKAKQPKPRRTQRPPVAVLLSRVQEVVEAEGFRVHPDKTRVARKGTRQRVTGLVVNAAGKDAPAARVPRDVVRQLRAAIHNRKKGKPGREGESLEQLKGMAAFIHMTDPAKGRAFLAQLTELESTASAAPQAE

SEQ ID NO: 20 - protein, 361 aa, Nostoc punctiforme
MYSQNLTTIPLATESNLERLETDNLALLRSHGLAEYNTAEEIAFAMVISLEKLHFLTTSTSLTRHYLPFKISKKTGGKRIISAPKPELKAAQRWILENILEKLEVHNAAHGFCKNRSIVTNAKPHVGANVIVNIDLQNFFQSISYKRIKELFSGFGYSESTATIFGLICTTAEIAINGQINHTASENRHLPQGSPASPAISNLVCRNLDIRLAAIAENLGFCYTRYADDLTFSTSEDASSKISNLIKNTKFIIHGENFTVNDNKTKISSKSVQQEVTGVIVNTQLNISKKTLKAFRATLYQIEQEGLSGKSWGKSTNLIAAITGFANYVAMINPDKGAEFKSSVERIKQKYGGSQTDEVRF

SEQ ID NO: 21 - protein, 383 aa, Burkholderia phytofirmans
MAGMPGFVSAWRSEQPPRVVRVLTRPPFQRPPPPWLHDVALPQLPTLGDLAAWLDIEPGDLGWFADRWRVPTRGAATPLHHYAYKAIEKRDGRCRIIEIPKPRLRALQRKVLSGLLDRIPAHESVHGFRHGRNIVTFAAPHVGKAVVMRFDLTDFFASVHAGRVYSAFYALGYPQAVARALTALCTNRIPSGRLLAPDVRERIDWRERQRYRNRHLPQGAPTSPALANLCAFRLDLRLAGLARSVGATYTRYADDLAFSGDEELARMADRLCIRVAAIALEEGFGVNLRKTRVMRRSARQHLAGVVVNSHANVARPEFDALKAVLTNCVRHGWRSQNRDDLADFRAHLAGRVAHVAMVNAVRGARLRAVFERIEWEEEKPLDA

SEQ ID NO: 22 - protein, 370 aa, Bacteroides fragilis
MELLLGIVIVVTCWMVVRIIRSSKNQEGYKRWRAGNYASENPYAKEKASGPLSQGLFSKRVRTTGARRFDDGAIRWCANLLATEESRLREVLDYIPRQYTCFHVRKRSGGFRYISAPAGDFRSMQQTIYHRILLLANIHPAVTGFCPGKSVSDNARVHLGRKNVLKVDLHDFFPSIRSPRVRAAFREMGYSRPIAKVLAELCCLRCCLPQGAPTSPALSNIIAYPMDKKMMALAGEYGLVYTRYADDLTFSGDYLPKDEVLVRIHRIIREEGFTMNVKKTRFLSEHKRKIITGVSVSSGKKMTLPKVKKREIRKNVHYVLTKGLVGHQEHIGSTDPVYLKRLLGSLCYWRSIEPDNRYVSDSITALKRLM

SEQ ID NO: 23 - protein, 563 aa, Listeria monocytogenes
MKTLKNIEDRKDLADYLNIPIKRLTYILYIKRTENLYYSFEIPKKSGGVRNIDAPKSELKALQKKLAASLTKYQEILQKSKRKAPNISHGFEKGKSIISNAKIHRNKKIVYNLDLENFFESFHFGRVRGFFEKNKDFELSTEVATIIAQLSCFNGALPQGAPSSPIITNFICRIMDMRILKLAKNYKLDYTRYADDLTFSTNDKKFIDQIDYFLHKLTKEIEKAGFKLNKNKTNLNFKDSRQLVTGLVVNKKINVDRRYYKETRAMAHRLYKTGEFQIDDKNGTLNQLEGRFSFINQVQRYNNVIDSSKHDFNNLNAFEKQYQAFLFYKYFYANNKPHIVTEGKTDINYIKAALKKHHLEFPNLIVKKEDGEFDFRVAFLKRTNRLAYFLNIKKDGADTMKNICKYFFDIENNEVPNYLKTFKILTKQIASNPTILIFDNEISNNVKPVSKIIKYIKLKEDSRVMLTEKSYLNLEDSLYLLMNPLVKNKKECEIEDLFDEATLNHEINGKKFSREKNMDLNKYYSKERFSNFIYNEYREIDFSNFKPMLENLNFIIENYKNEK

SEQ ID NO: 24 - protein, 456 aa, Escherichia coli
MDHFSSVVDNYILQTNKDGHYCWRPFELIHPAIYVHLVHKITEDESWQLLLERFGEFQSNTKIVCASLPRESEEDGVSDKAKAVSGWWRDVEQESINKSLQFKYLFSTDIANFYPSIYTHSIPWAIYTKEDAKAARGAGRNLGDQIDYALRQMRWGQTNGIPQGSALMDFIAEIVLGYADELLGQKLESQNINDYHIIRYRDDYRIFTNSKEDAEAIARHLTVILQGLGLQLNASKTSLTEDLVLGSMKPDKQEALMVFGRSVNATTIQKTLLKLVIFSRKYKNSGQLEAYLAKINKRLERMSSIKEEVRAIVSIISDLMINNPRTFSSCALVLSNVLKFVDNDVEKLELLKQIKDKFKPILGTGILDIWLQRISYHINRDIEYKETLCSIVSGVHDRPHEHVWNSEWISDNNFKNSIMATSFVDNDKLQACEPIIPEEEVTLFPYDSDVDEEDLE

SEQ ID NO: 25 - protein, 542 aa, Bacillus sp.
MKDLTAKDLIGKGYFPKEIPKGFSTNSLAEKFSNLDFSTFTKKERGKWYKTSNISIPKFAHSRRILNVPAPFPQMRLSQLLVKNTEELNEYYSQSKLSLTRPIVKEESDRAVERKYHFSKIIERRIESINDKKYILKTDISRYFPTIYTHSIPWALHTKEVAKQTRGDSLLGNTIDEYVRNIQDGQTMGLPVGPDTSLIISEVIGTAIDIKLQEAHPNIIGSRYTDDFEFYFKTQSEAEKVLNTIQEIVRHFELDINPVKTEIISSPNLLEPIWLSNLKLYQFRSSATAQKNDIKTFFSTAFYYQNQSPYEGVLKYCLKKIKNLKIKEDNWSLFEALILHIMLIDPTTLPLIENILFGYKEIGYPINEQKIKDTIAEIFASNIAVGNNYEIMWALSLSNKLQLKISNESSKLLFNLEDSFSNILTMEAYTNGYIEGGYEPEYFKTLLNENELYGRNWLFAYEMSVKGWLKPHQQKEYVKKDTFYNQLFESKVEFYHNDRKAEIKNDDWLTALLNDDDIEELFIQNASSKKPYLRGGSGGADY

SEQ ID NO: 26 - protein, 350 aa, Bradyrhizobium diazoefficiens
MKASKLRPRDFLQCLLSTAYLPEELPPTVTSREYSEFCRRNYALVRAEKDKLIKLATSYDTYSAPRNVPGRRALAVVHPLAQLGVSLLITERRAEIRSLLKKSGTSLYDVSEAAAQAKAFAGLDFQKRRTLAAKLHSEKPFILQADISRFFYTAYTHSIPWAVLGKEKAKELLRTNRKKLNAHWSNKIDEALQSCQSRETFGIPVGPDTSRVLAELLLSGVETDKSLSKYLQPTNAFRLLDDFSIGFDNEADARQALRAIRQVLWRYNLQLNEEKTKIITSPLIFREKWKLDFDKAPLSQIDPQQQLRDIEYLVDLALNACFESRGNSGSMGLPPPKSGDSSRRHLSHLA

SEQ ID NO: 27 - protein, 488 aa, unidentified
  REGION 1..488: note = Description of Unknown: Candidatus Kuenenia stuttgartiensis sequence
MAPDKDFVLIALLKYNYFPAHKKEKEELPPIFSTKQFTKKIAQKLSHLRSRKDGYDQISYKITRYNNIPRVLSIPHPKPYADIVFCLSENWDNLAYICNNEVSLIRPRQHKDGRIIIMNYEGSHEKIERSLKKSFGHKFCIETDITNCFPSIYSHAIPWALIGLKEAKSRKRYKNEWFNKIDARQRMLKRNETQGVPIGPASSNIITEIILAKVDEVMSKDFNYIRFIDDYTCYCKKYEDAEEFARRLSQELSKYNLTLNLKKTHIHQLPKPTNDDWIIDLKSRISGDSKKITHYQAVNYIDYAVSLNKKIPDGSILKYAFKSIRGRLNVKDERFCLNYILLLAPHYPILIPIINKMLHNASKKDKFVYEKELKYILDESIVNHRSDGMCWTLYYLLKNKVTLSPEIAKHIIATKDCMAILMLYLFKKFDTEINGFANGLDKTDLYGLDNYWLLLYQLFYDNKIKNPYKDEETFKILKDNNVNFIQSK

SEQ ID NO: 28 - protein, 645 aa, Roseobacter denitrificans
MSNIDDRMREVRAVLTETLPFELPLGFTNENLFLSELRLDQMTGVQQNYLNRLRRPHNNYTKPYLYSINRSRRSKNTLGLIHPAVQLRIATFYSEFEQTIIQACGRSTFSIRHPYEALRIYSKDSAKDVRKRWKLALPGENVGHAIKTSYTSSYFAYRKYLLLDKFFSSNEIIRLEGKYSRLRMLDVSKCFFNIYTHSISWSLKDKDFSKKNAKNYSFEQQFDTLMQHSNYNETAGILVGPEVSRIFAEIILQRVDVELERAVSKRLKLECGRDYDIRRYVDDFHLFANDEDVLDKVEGVLAEILETYKLFLNTGKSEEVERPFVTGISRLKFEVSGICAKLYDELTVDLSNNEESSAEARETLRKARVSLDALRHIGGTERALLPSAMSEVFTTLSRIVRSLNKMTELDLSEAQSEDLIARVKTVVRVLFYLSAIDFRVPPIIRLSLILKEVVRLSKKLAQPYRETITGYLVYELSELMATHYVEEAEAVGLEVANTFVLGLVVEPALFAMQESSAKFLHNVLTGKHKCYFSVLCALHALNSVENIKEDEKNAFVDGLINRILSNDFEIEVSCEEYLIFCDALSCPAIDRDVRWQTFQDKLGGQGLSKAAFDELALCFRHINWDANGPGFELVQRRLPPVYFSG

SEQ ID NO: 29 - protein, 525 aa, Desulfitobacterium hafniense
MPMLKLAERSLDWALLHIEKYGDTDIFPVPFEFEAIRYQWEQSMRSWLRSQDILQWTPRPYRRCLTPKHRYGFRVATQLDPLETIVFTSLVYEIGKDIESARIPKEEKIAFSHRFAAKPDGRMYDSEYSWDLFQDHCGELVESNDYRYVVIADIADFYPRIYFHPLENALSECTRKKNHIKAITSMIKNWNFSVSYGIPVGSAASRLLAELVIDDVDRGLLSEGVKHCRYVDDYRIFCKNEREAHEHLALLANTLFENHGLTLQQHKTRILPIEEFYNHYLQRENSQELNSLSAKFYHILDSLGIENRYEDIDYDDLAADVQAQIDNLNLMGILKEQVLETEAIDIPLVRFVLKRLKQIDSEESVDFVLDNINQLYPVFKEVITYITSLRSLNTADKHEIGKKLIQLLEDSIVSHLEYHRLWVFDTFTKDREWDNEGKFVNLYNSYHDEFSQRKLILALGRAQQHSWFKSRKRTVNQMSPWLKRAFLAAASCLPGDEAEHWYKSLQGSLDPLELTITKWVQANPF

SEQ ID NO: 30 - protein, 562 aa, Erythrobacter sp.
MQSNDEVDYIVDPAFWLNGQALGFPVNFELVLKHLRQDMRDDWYYDCLQYDDLFKDPSEAKRIIISLLQEWNGEYRGTRSVVRNIPKQGYGERYGLETDFFDRFVYQAICSFLIPFYDPLLGHRVLSYRYEPTPIKAKYLFKNKIDRWFTFEGVTLTFRKSGLYLLITDLSNFFENVSREQIIKALEQAVPNLLATGPQKLHVRNAIATLDRLLGQWTYSGDHGLPQNRDASAFLSNILLSNVDRKMAEKGYDYYRYVDDIRIITDSETHARRGLQDLIRELRTVGLNINAKKTEILAPDVSDEKVAKYFPSQNSSTIAINQMWQSRSRRVVTRSVTYIFEILSKCIAEWDTQSRTFRFAVNRVAKLVDSGLFDVGDALSVELLDTLSQSLSEHAVSTDQYCRLIATLDHGGRCLPSLEAFLLAEDGAIHDWQNYNIWMLLAVRQHRSDDLVALAERKLQADMKSGEAAAILIWLRCVDEKALIARCLEEFANLPFQNARYLLISASVLEEEVLRPLYGHVPTGLRGTGHRTQRHCNEDGLPFAPRENTDLLNLIDEISGYD

SEQ ID NO: 31 - protein, 605 aa, unidentified
  REGION 1..605: note = Description of Unknown: Flavobacteria bacterium BBFL7 sequence
MLTDRFHQIRKEELENLFSKKNISDVWRKIVRDQLRRVDILDTFDYYDFNYNIDERALLLRTVLLNGNYQPSQPLIYRIEKKFGICRHLVIPHPLDALVLQVITENISQQILNNQPSKNSYYSRDKHNLRKPHEIDEYGYHWRRLWKKMQKQIYQFKEEKELIIVTDLSNYYDSIYIPELRKVISGFIDKKESVLDILFKIIERISWLPDYLPYTGRGLPTTNLEGVRLLAHSFVFEIDEVLKSKSNESFTRWMDDIIIGVNSRTEAVNVLSSTSDMLKSRGLALNLKKTNIYSSKEAEFHFQIEENQYLDSIDFDYHIEHGIRKIGSELSKRFTKHLKNNVSAKYSEKITKRYITSFAKLQSKQLLKKVPVLFNEIPGVRGNLLYYLSSLGFSKRTSEIVLNILKELKLHDDISLFNVCKLVTDWEIPITKESDAFIKAFIKQVKSFSIQRKQPFDFYCLIWVKTKYEHPDELLKFINDYDYIWKTHPFLRRQVTSIMGRLLNYRKDEITKFLQSQIATSEPQVVSVANSILEFSKIKTVEQKVKMYLFPQSKYRTYPYQKFLVLCSFLNSEVYSKNEDIKKKVLENISDPYYLKWLDYQYNIK

SEQ ID NO: 32 - protein, 448 aa, Bordetella parapertussis
MQVTLLREERMRSFLSQVCDQLNMRWAWEKVKRASVPGDIWIDEADLAHFEVHLGHELRGLGDDLLSGRFRMSPIRPMVFPKNPDGDGNPRVRQYFHFTVRDQAWVAVVNVLGRYIDEQMPVWSYGNRLFRSAWIEEDIHGNKIRKIGPYRHSSGRIYRLFQQSWPLFRRHIALAVSAAAHGYSKVDSLDDDEREELGFQRRMHRANQCPFVLADYWTNLPTGPNESDVYWASVDLEKFYPSIPLTACVDAISQFVPAELRPEVQRLLKTLTQLPLNLDGWTDAELKHIELDESRKTFHKIPTGLMVSGFLANAALLPVDQEVQKTLPRGRVAHFRYVDDHVILTKTFDDLITWIDHYKDVIDNLGSGASINPAKTEPKALGELLGTSDTSKRFAGSDLWNRAQKECRLDPEFPTPLMTKTIALVSAIGKTDFTALEDNELSILPQQL

SEQ ID NO: 33 - protein, 1301 aa, Burkholderia lata
MLLPTLRGHATFGVDVRHTQKITGHGMTNKTDKYAALAPRIEYLSDVVVLSQAWKKTHTYIRHHNWYADTLELDCSAVNLDGELSQWSAELRDGTYTPKAARLVPAPKSDPWVFGDAEINGWAPVSSSEHFLRPLAHVGIREQTIATAAMLCLADCVESAQGDTSLDALDAQKAGVFSYGNRLFCSWTDQGARARFSWGNSNVYSRYFQDYQSFVERPLLIAQSAVLSGQDALTLFVIKLDLSAFYDNINIEGLVEKLTELYWRYSETIAPTAKTSSARFWATLAKSLSIGWQVEDAKWAPYLKGQKLPSGLPQGLVSSGFFANAYLVDFDEAVGESIGRSFNRRGVKFRLHDYCRYVDDVRLVVSCDKQVPSEEELGLALTEWVQARLDSKANDVEFEERLVVNEQKTEVQPFASLGGESGTAARMKSLQSQLSGPFDIAALQHVEAGLNGLLAQAELGTAAKQKVDGGRNLPPLASVVRPKREVRDDTLTRFAAYRLTKALKLRRKMTDLTQDEEAGLSRNILLHDLEVAARRLVAAWSLNPGLAQVLTYALDLFPCPELLKTITDALLTKVLGTQEDAYSTGTALYTLAQLFRAGASQTGKYWESDGSLQVGDVERYRLELGQLARMLIDEGVLPWYVRQQALLLLASLSQVITLDTSFDELPYHRSLHEFIGKRVDEGLPHIEETIAVSLVGHQLLRDDAHYAMWFAALSRQSTRKDRLIALELLAQNQPHLLRVIAASRSNRQLAAEPAFQSIVRYFSSFKEPEDECALVDGEWLSFGDIVKMRDTPFHEENALLQLAFALADAVSRTDELPEQWTPQTIQVRCEDWALLSDPRGMPRLSIRIGPTRGRRDPRYRTPEWCNSEDAILYAIGRVIRCAATGELDFTARQWLLREENIGWYRGISSTWKKRQIGMLNTSVAMAGTTAAITPWFSELLLRLLRWPGLQAQLETSSSVGVVTDAAMLRDLVHERLKAQAALFGKSSNLPIYVYPVDWPIDESRLLRVCVIQGLLPTTKDFDGGLASLHKEGFRARQRNHTASILYLAYQQLQARDSVLGKDHKPYVDLVVLPEYSIHLDDQDLMRAFSDATGAMIFYGLCGATHPVTSEPINAARWLVPQRRNGGRSWVEVDQGKKYPTTEEETLGVKPWRPHQVVIELSSGGAGKFRISGAICYDATDISLPADLRDVSHMFIVSAMNKDVKTFDSMVGMLRYHMYQHILVANAGEFGGSTAQAPYEQEHKRLISHNHGSDQISVSVFDVDINHFGPNLQATKVTLDPSGKKKRIGKTPPAGLMRDSVQ

SEQ ID NO: 34 - protein, 316 aa, Aeromonas hydrophila
MRPLAHVSIKDQTIFTALMMLLANHVETEQGDTSTSFYDVHAKGLINYGNRLHCKYSDNNAIYSWGNSNTYSKFFTDYQRFLERPIHFGREAKRVKTSKEEIYEIHLDFSKFYDSVNRGILTKKISALVEKITGAETDECISHVLSKFRNWKWTEKSKELYTGVCKNKHIETLKDNRGIPQGLVAGGFLANIYMLDFDKAISKLIGQYLDDNETILLIDACRYVDDLRLIIKADKNEVSENKIREVITTRFKSYYDELELILQPQKTKVKKFSSKDGAISSKLAHIQNKISGPMPLHELDEQLGHLEGADRTNRQP

SEQ ID NO: 35 - protein, 337 aa, Prosthecochloris aestuarii
MKRVGLLFERVVAFENLLHATRQAARGKKSQLRVAHFLFHQEKECLRLQTELKQGIWQPSGFRVFEIREPKPRRISAADFQDRVVQHALCNILGPLCERRLIFDTWACRRGKGSHLAMKRAQAFSRRFPYFLKCDIRRYFDSVDHTILKRLLWRLIKDKPVLNLLDRIIDHPLPGALPGKGLPIGNLTSQHFANLYLGELDHQLKDRMGVKAYLRYMDDMLIFADDKSRLHELVTGIEDFVKQHLQLSLRPSATLVAPVSEGVPFLGFRIFPGLVRVNGQALRRFRHRLRLHEKAYQTGKMDVESLTASVQSMIAHLQHADTHRLRQSLLSSSCALG

SEQ ID NO: 36 - protein, 362 aa, Psychrobacter arcticus
MFFLRIVMKRIGNLYESVVSGESLWEGYLGAKKSKGGRRGCFQFEKSLGRELNELQEELANNTYKPRPYFKFIVYEPKKREIYAPAFRDCVVQYAIYLRVMPIFDKTFIDQSFACRTGLGTHKAAEYAQDALRRAGPNTYTLQLDIKKFFYSIDRPTLRKLLERKIKDKRLVDLMMLFADYPEPKGIPIGNLLSQMFALIYMNPVDHYATRVLKPAAGYCRYVDDFLLFGLTRAQALTYRKLLTDFVEQKLKLTLSRSTIANTKRGANFCGYRTWRSGRFIRKHSLYKTRKAVRANKLESVISHLAHASKTHSLQHLLNYAEQQNHGLYCQLPKIYHTRHHQAVERSGRINGVMRNRCSNVC

SEQ ID NO: 37 - protein, 1000 aa, Bacteroides fragilis
MIDNKLFTFQQIYEAYRKLKSYIYYDNTSLFIRKEFSSFESSILAGENFEDNFKKKMKSLYDILNSDNYQTDLDKLVSKIGYKLVPKSIKKKESTIVTNIPHTGKIEVESYNILIDAPIEIHIISVLWLIVAGKELCKYVNENNYAYKLLLLDESYLPMTDIKIETNKENYVVTGLQLYEPYFIGYQNWRDNALNSATKLLDDNKDATILSLDIQRYFYSVRIDLDSIKNRCSHSNKQIEKCFHLLQIINKTYTSKINKLLDIPLTNDELNAGYTILPIGLLSSGLLGNLYLEDFDKTIKEELNPAYYGRYVDDILFVFSDRKVKLEVNNPIHDFIDRYFIKKNILETILDENNITYLLPVGSHKLKIQSEKVILEHFNHKESRAAINIFKKNLDKNRSEFRFLPYEENIDNEFDNEAFSMHYSDSINKLRSIKEFKEDKYGASKFLAHKIFLSKISPNEKDYNRKYFFQSSKQILTFFKGSTALSLYTLWEKVATYFVINNESKCLIIFYNQVLNTINNIKTVNGENKIKEDLKEFLFISIAMPISMRMNIKIDNNNDDVVIHKLADDIRKTNMFRQNLLGISCINYTDYIDHITNDLFHINIKNIKDLKIQINIAKFISPRFVHYHEFNILNIYQVFSSINKESDIRLFDKIQDIAFNQYKEFNYDWRFLYSNTDPIYPKDFFTLTQSENSNCKNINILEDNEVECNKKIGLANIEVSENDILSAIKMIPNISKERRKRIFEIMNYSHKKHVDLVVLPEVSVPFEWIDFFAEQSKNNNIAFIIGLEHVVSSYNFAYNFTATILPIKQKEFTTCLVRIRLKNYYSHSEKELLKGYRLINPSEIKPELKLYDLFHWRKSYFSVYNCFELANISDRALFKSKLDFIVATEYNKDINYFSDIAGSWVRDLHCFFVQANSSQYGDSRIVQPAKSDFKNMISVKGGKHPVVLIDELQIDKLRDFQNKEYNLQKELIDKEKTHLKPTPPDFNKDNVLKRIKDEPI

SEQ ID NO: 38 - protein, 423 aa, Pectobacterium atrosepticum
MREQSFDKFSLSKRIKQSDFYKCKNLVDEKVFDQVIEESYQLAHGLTAPVISKTISKGKEVYYVDRLSYKLILRKLQGNIRNKIETDKLQRNEIVRNLVSYLQEGVKSKVICIDLKSFYESIDIDSLLSETAKIGSLSYHSKKLIEVVLDEHRSIGGKGVPRGLELSSLLADLYLQEFDEWIKRIDGVFLYKRFVDDILIMTDHKVDEQSILTSIKNKLPANLCINNLKTQIIEIKKRTHSPNDVEGKLAATIDYLGYKIKVIDTHIPPAANGASSEGKANSVYRKVVIGVSDKKLNKIKTKLCKAFYNYELNRDFTLLLDRIIFLSTNRLLINKDKNRKMPTGIFYNYPLVNDDNESLKVIDFYIRALILGSGCRLSKKLNGSLNNGQVKTLLKISFAKGFSNKIHKKYSLNRLKEITRIWK

SEQ ID NO: 39 - protein, 349 aa, Caenorhabditis briggsae
VGRHEKNSVLEISFKYAPRGVELVKARSEGAAPLPTEPRGQRESARPIAYIKARTTAVRRVTLSVVHRYGRMHTLATKKLRKISCPPTFKKETKFLKSSEIEKFKNSQKKVFDVEALYTNIDNRAAYQAVVDKLKKNASVIDWYGDSFTHIKMLLKSCLEFNGFQFDGRIYEQKRGLAMGSRLAPVLAVLYMDIIETPSKVHPIILFRSYIDDYIVVAESQDTLDNIFTCLNSQATHIRLTREAPKMDWLSFLNCELRFKNKVFSSRWYRKPSNKNLLIRMDSGHPKQQKINTISTTQKTATENSTIDQRSYSRNLANEGNFDGKKNRLSNAKKSENFRSSLQNRIDFV

SEQ ID NO: 40 - protein, 394 aa, Schistosoma mansoni
MDVEIQFENLYAQTAELVSSSKDNVESFKSTLVDCCFRYLNHGHSSKGILTNKHKEALRKLKTNDNLLITKPDKGYGIVLMDKNNYINKMKAFLNDQSKFQKLVVKNDLADKIEKQIIDSLKQIKQQGFISEKVFEMLKSIGTRTPRLYGLPKIHKSGLPLRPVLDMNNSAYHTIAKWLMQILKPLHKEIVKHSVKDSFEFVNNIKNLSLKNKFMISLDVTSLFTNIPLLETVDFICNELTERHTETVIPVTAIKQLILRCTMNVQFRFDNEYYRQLDGVAMGSPLGPILADIFLAKLENGPLKDTISHLTSYCRYIDDTFIVLEKEHEKENILNIFNNIHPSITFTLEEEQNGSISFLDVQLTRRIDGTLKRGLHRKSTVGQYTHFYRAVSIK

SEQ ID NO: 41 - protein, 262 aa, Fusarium oxysporum
RSELIEIMNQCRAFRLTMDLKRYYLTKPNGKYRPIGSPTLGSKVISKALTDIWTTIADKRRGVMQHAFRPKLGVWSAAFAVCQKLRSRKPSDVIIEFDLKGFFNTIKRNSVQEAANRFSLLLGNCVRHIIDNTRYVFEELKPETELHIINDYTHHKYKRAIPIYRTGVPQGLPLSPVAATIALENEVNMPEMVMYADDGILIGGKEKFAEFVKKAIRVGAEVAPEKTREVTKEFKFLGLTFNLEKETVSNGDSYRFWNDKDL

SEQ ID NO: 42 - protein, 265 aa, Strongylocentrotus purpuratus
MDNIHTAKHLISPHCYLASIDLQDAYYSIPVDPNSRKYLRFMWQGERWQFAALTNGLSTAPRLFTKLLKPVFAELRQAGHTVIGYLDDTINIGETKEKLKESVMRQHFENRGLSRRTVDIITASWRASTCKQYQVYITQWRRFCHSRNTSYLQAEVETVLEFLSSLFHDRNLSYRNDNYPSRLQEARVPLLPRSTCTRQNVYGNKLTPQMLCAGYLRGGIDSCDGDSGGPLVCENSNSVWKVVGVTSWGYGCAQPNAPGVYAVVT

SEQ ID NO: 43 - protein, 585 aa, Danio rerio
MSPSRWLIRTIRLGYAIQFAKRPPKFTGVYFSRVNPLSAPVLREEIAALLAKGAIEPVPPAEMESGFYSPYFIVPKKSGGSRPILDLRVLNRCLHKLPFRMLTQRRILQCVRPRDWFAAIDLKDAYFHVSILPRHRQFLRFAFEGRAWQYKVLPFGLSLSPRVFTKLAEGALAPLRLAGIRILSYLDDWLILAHSREQLIMHRDEVLRHLRLLGLQVNREKSKLAPVQRISFLGMELDSITMRLLGHMASAAAVTPLGLLHMRPLQHWLHDRHRVSVTALCRRALSPWNDPSFLQAGVPLGQASSHVVVSTDASNTGWGAVCRGHAAAGLWKGAQLHWHINRLELLAVFLALHRFLPVLERQHVLVRTDSTAAAAYINRMGGMRSRRMSQLARRLLLWSHPRLKSLRAIHVPGTLNRAADALSRQLLRPGEWRLHPESVQLIWARFGEAQIDLFASPENAHCQLFFSLTEGSLGTDALAHSWPRGMRKYAFPPVSLLTQFLCKVREDEEQVLLVAPLWPNRTWISELSLLATALPWRIPLREDLLSQGQGTIWHPRPDLWNLHLPLKKQTVTGSIIAESLKGYML

SEQ ID NO: 44 - protein, 891 aa, Aspergillus terreus
MLPPTGALSQTLQSLTDSKIQEVEKLRGLYESQKTSILHEADQVTNHQERVARILVGIKRYYPNEYHDPEVRNIEQLLDQARYDSSIPPETLQKFESQLRARLETKSRRLGLADLYCRLLTEWMQPPTDPEKGKEVATIEDDFLLVEGKQKQKLKELCDQFESVVFEPRETNADEIRGFLDGLFATEESAKALEELRARIHLQCITFWEEEEPFNPDALAMCIRGLLTEDLLSEEKQDTLKYILENKVALREISDVLNMRYADLGNWDWRAGKDGIPVLPRQQVNGKYRIWMDEDVLQAVFTQYIFIRLCNMVKETLTDFIGDGRVWDWGRSREMTERDKLRWKYYFNLSSPASFGVDAVRKQEFLERHFLYQIPSTQTTLQERGGAYDDDDGDEGSYAAPSEVPKNIKQQLLRKIATETLIQRQVNGRAAVVQSDLQWYATALPHSTIFAVVKYLGFPEKWIRFFEKYLKTPLNLIRSFEDSQSGPRIRHRGVPMSHASEKFLGELVLFFMDVTVNRKTGMLLYRMHDDLWFCGEPEQCVKTWEVLQKYARITGLDFNYSKTGSVYLADIVDEAVVSKLPQGPVKFGFLILDPKSGSWVIDHSQVEAHIQQLKKQLDHCDSIISWIRTWNSCIGRFFRSTFGEPAFCFGRPHVDAILATYAKLQNTLFDDQRQCGALRVTEFLRQRIKSHYGEFDIPDSFFFLPEELGGLGLRNPFVPIMLVRGNIENSPIDLCDKFKKEEIEDYVAAKKAFEDLHERARLRRLDYINREADSRLGQIIKTSEMNHFMSFEEYTRFRESKSTRLRSCYEELMRVPERMSLFSTQIVRDELHRTGRSRLGHLDLETKWLLNLYADELLANFGGFDLVDKKFLPVGVLNMVKGKKVKWQMVL

SEQ ID NO: 45 - protein, 873 aa, Parastagonospora nodorum
MAASSLSTLQHVTLQKLNKLDSQRQQFESDKKSILEQVSSVPDHRSKVEALLDGFELHGIAPKQADLSISNLKHFVHQAKHDPSVSASLLKDWQSRLEHELNVKSNKYEYAALFGKLVTEWIKHSTLVKSADVSDGSIAKGRKKMQEQRQSWENYAFVEKEVNQSTIEQYLSDIFGDALQTEKIKKSPLRVLRDSMKEVMDFKSDLDTSEKDFSSNKRFGHSAPHGSRFTIELLQSCIRGVKKADLFTGRKLEMIIDLEKQPAVLKELVDVLNMDVDGLDHWEWDGPVPLNMRRQTNGKYRVYMDEEIHQAILLHFIGKTWAVALKKAFTNFYHSGAWLQAPYRSMPKKIRQRREHFIENSNKSGDSVRNYRRQKYQQEYFMTQLPSNAFEDAREYDAAEGQEKNSHIATKQTMLRLLTTEILLNTKVYGECSVLQSDFKWFGPSLPHDTIFAVLEFFGVPAKWLRFFKRFLEVPVVFAQDGAGAKARVRKCGIPNSHILSDALGEAVLFCLDFAVNRRTKGANIHRFHDDLWFWGQETTSVQAWEAIKEFTEVMGLQLNEEKTGSSIIVADKSRARVPHPNLPEGNLHWGFLELDASAGRWVIDRAQVDEHITELRRQLDACHSVMAWIQAWNSYVGLFFNTNFAQPANCFGRQHNDMIIETFSHIQRSFFGKYGTANVTEYLRSVLKERFQTTDAVPDAFFYFPVELGGLGLNNPSISAFATYQNSSRDPSARIERAFEEEREAYDTAKQRWDAGDVPCPNRETDEPFMSFEEYTAFREETSHPLFEAYMNLLECPVEERVETSDEMYEALRRSDAPHALGSNHYWLWIFNLYAGDLKQRFGGQGVQLGERDLLPVGLVEVLKSEKVRWEN

SEQ ID NO: 46 - protein, 1062 aa, Gallus gallus
MALVDTGAETSIIYGDPNQFSGSKAMIGGFGGQMIPVTQTWLKLGVGRLPPREYKVSIAPIPEYILGIDILSGLTLQTTVGEFRLRERCISIRAVQAIIRGHAEIEPICLPQPRRITNTKQYRLPGGQQEITKTVQELERVGIIRPAHSPYNSPIWPVRKPDGTWRMTVDYRELNKVTPPIHAAVPNIASLMDTLSREIETYHCVLDLANAFFSIPIAKESQDQFAFTWEGRQWTFQVLPQGYVHSPTFCHNLVASDLANWNKPSTVKMFHYIDDLMLTSDSIEALEKTVPSLITYLQEKGWAINPQKVQGPGLSVKFLGVVWSGKTKVLPSAIIDKIQAFPVPTKPKQLQEFLGILGYWRSFIPHLAQLLKPLYRLTKKGQVWDWGRTEQEAFQQAKIAVKQAQALGIFDPTLPAELDVHVTQEGFGWGLWQRQGSVRIPIGFWSQIWHGAEERYSMVEKQLLATYSALQAVEPITQTAEVIVKTTLPIQGWVKDLTHIPKTGVAQSQTVARWVAYLSQRSRLSSSPLKEELQKILGPVTYHNGSSRGNPSRWRAVAYHPSTETIWFEEGDGQSSQWAELRAVWMVITQEPGNSALNICTDSWAVYRGLTLWIAQWATQDWTIHARPIWGKDMWVDIWNVVRHRTVRAYHVSGHQPLQSPGNDEADTLARVRWLGNTPSEDIAHWLHRKLRHAGQKTMWAAAKAWGLPIQLPDIVQACQDCDACSRMRPRPLPETTAHLARGHNPLQRWQIDYIGPLPRSEGARYALTCVDTASGLMQAYPVAKANQANTIKALTRLMASYGTPEVIESDQGTHFTGATVQKWAEDNNIEWRFHLPYNPTGAGLIERYNGILKAALKADSQSLQGWTKRLYETLRDLNERPRDGRPSALKMLQTTWASPLRIQITSKDTSLKPQVGTMNNLLLPAPDDLEPGRHKVKWPWKVQAGPKWCGLLAPWGRLLEVGGSVNPSVIGVWPTEVIVDTPVFIARGTLIMSMWQIRTPPLVPDIVIQSQISGQRVWYRRPGRAPIQAEVLTQDRNTACILPWRADLPLLVPIKHLFYSP

SEQ ID NO: 47 - protein, 450 aa, Bos taurus
MVKSLCQPRKHQGGHQVIHEFLCIPECPLPLPGRDLLSKLGVQVTFSPEERPTFRVGTPTNLLSLSVTPQDKWRLREPPGDKQGQATEVERRLTQLFPEVWGEDNPPGLARHQAPMIIELKACATLVRKCQYPIPRGARIGILPHISRLKQAGILVECQTAWNTPILPVKKEGGQDYRPVQDLRLVSQATVTLHLSVPKPYTLLSLLPPKTRIYTCLDLTEAFSRICLAPASQPIFAFEWDDPIGGNKQQLTWTHLSQGFKNTPNIFGEALASDLEPFQPERYGCCLLQYVDDGLLAAETWVECCEGTPVLLHLRAEAGSRVSRKKAQICKEEIRYLGFVLRGGTRLLDQSRKEVILRPHTPKTHRQVREVLGATGFCRIWIPRYSQIAQPLFELLTGPEENPINWTEKQQKAFEELRLAFTSACALVLPDLPKPFTLYVTGKDEQPWGF

SEQ ID NO: 48 - protein, 879 aa, Danio rerio
MPEIANDGSQSHITFFLCASLLFPMEARSYWGDSPCCSPQLDDIVDHDGLQTKRSSSSPQGAPKKRTAFVDITNAHKIELCNPIKKKDPAKKVQKTSVLLKNDVNLKSIVSPEEKLEELKNVESDIEETSCKDPIPPHLLPPEIPPEFDIDSEHLSDSSHTSEYAKEIFDYLKNREEKFVLCDYMVDQPNLNTNMRAILVDWLVEVQENFELNHETLYLAVKVTDHYLAVSQTKREALQLIGSTAMLIASKFERVEDICLNWRNGHLTNILLCAQHAEDKLTVKQEQDKKKAERELCMALVQVANQRSNQHLTTKFKGDKGVKGEKDTRWRNWYVTYGDETCRACRARDVNRYQMSALATEMDFWLRIDPKGANQQRGADVRRGKSRMERVWANSQQLQDIMSPGELHCTSHVVTDRDAEFEKAWFEANVNETLILEKMYWKDSLCAVSVSLSEKQRSFYLMSAQAVPHISVCKGKHQSWADLGPFEKQCLEVKDCISREGGVEWSALSQAFRVDSETETAVSRTVTAIDKHCVKNSCMVDFNAADIHPALAEILSELWAKSKYDVGFIKGCDPVTIIAKSDYRPCQQQYPLKREAIEGITPVFEALLEQGVIVPYNNSKVRTPIFPVKKIRDNGMPTEWRFVQDLQAVNAAVKQRAPLVPNPYTILSQIPEKSQFYSVVDLANAFFSVPVDKDSQFWFAFNFNGKGYTFTRLCQGFTASPTLYNEALLRSLEPLTLTAGTALLQYVDDLLICAENEETCVKDTVTVLRHLAKEGHKDMQTFATGLEKNKWRQSGCVMKDNVKAAQGKAAERPLHSLRPGDFVVIRDLRRKSWRAKLWLGPFQVLLTTETAVKVAERATWVHAGHCWKVPSPEKDSTRE

SEQ ID NO: 49 - protein, 366 aa, Bos taurus
MVHGTLLVLQGPFVSAGGHLVIHEFLYLLGSPIPLPGRDLLTKLGAQITFAPGKSASLTLGRQSALMMAMTISREDEWCLYSSGREQINPPRLLKEFPDVWEEKWPPGLAKNSVPIVVDLRPGATPVRQKQYPVSQEACLGIWDHIQHPQNAEILIECPSPWNTPILLVKRSGGNDYRAIQDLRTINCSDHHPSSGPKFLHSLESLTHSGKLVHLPRSHGLILLPPAVTSQPLFAFEWEDPHTGRKTQLTWTQLPQGFKNSPILFGEALAANLAAFPSETFNCTLLLYVDNLLLASSTQGDCWRGTKALLALLSTTGYKVSWKKAQICRQEVKYLGFVITKRHWVLRHERKRAICSIPWRDTKKEV

SEQ ID NO: 50 - protein, 936 aa, Gallus gallus
MVVGTLPLNLLGLDMLKGKSWTDDKGREWMFGVPSLNIRLLQTAPPLPPSNLTCVKPYPLPLGARSGISPVLAELKEQGIVIPTHSPFNSPVWPVRKPNGKWRLTIDYRRLNANTGPLTAAVPNISELIAAIQEQAHPFMATIDVKDMFFMVPLHPDDQLRFAFTWEGQQYTFTRLPQGFKHSPTLAHYALAKELEQIPLEEGVRLYQYIDDILIGGDHLTPVKIMHDKIIKRLEELGLTIPPDKIQSPAAEVKFLGIWWKGGMACIPQDTLSALDQLKMPENKKELQHALGLLVFWRKHIPDFSIIARPLYDLLRKGVSWGWTPVHEEALQLLIFEAITHQSLGPIHPSDPVQIEWGFAHSGLSIHLWQKGPEGPIRPIGFYSRSFKDAEKRYSQLEKGLFVVSLALREAERTIRQQPIILRGPFKVIKSVMSGTSPPDGVAQRASVRKWYAQIEHYCNIFKVTEGAPKTLAIQDDILSTTDTDLPSVVQVAPPYSDQLQNVWFTDASSKREGKVWKYRAVALQIGTDLTIITEGEGSAQVGELVAVWSVFQHESESTTRVHIYTDSYAVFKGCTEWLPFWEKNNWEVNRIPVWQKEKWQDIISIAKKGQFSVAWVAAHQEDGTPVSHWNNRADELARIAPLRQGEPDSDNWERLVEWLHVKRGHTGALDLYRETQARGWPVTREQCRTCISACDLCRTRLGQHPLQDAPLHLREGKHLWETWQIDYIGPFRKSEGKQYVLVGVEIISGLLQAESCPRATGENTVKALKKWFSILPKPTSIQSDNGSHFTSGVVQEWAREEGIHWIFHTPYYPQANGIVERSNGLLKKFLKPEKTNWSTRTSDAVRRVNDRWGINGCPRFNAFYPKAPPLLPITLNPDKLEEPSYSPGQPVLVDLPHVGPVPLTLMESLNKYTWRAKDAREKEYKINARWIIPSF

SEQ ID NO: 51 - protein, 395 aa, Homo sapiens [sequence omitted]

SEQ ID NO: 52 - protein, 1132 aa, Homo sapiens
MPRAPRCRAVRSLLRSHYREVLPLATFVRRLGPQGWRLVQRGDPAAFRALVAQCLVCVPWDARPPPAAPSFRQVSCLKELVARVLQRLCERGAKNVLAFGFALLDGARGGPPEAFTTSVRSYLPNTVTDALRGSGAWGLLLRRVGDDVLVHLLARCALFVLVAPSCAYQVCGPPLYQLGAATQARPPPHASGPRRRLGCERAWNHSVREAGVPLGLPAPGARRRGGSASRSLPLPKRPRRGAAPEPERTPVGQGSWAHPGRTRGPSDRGFCVVSPARPAEEATSLEGALSGTRHSHPSVGRQHHAGPPSTSRPPRPWDTPCPPVYAETKHFLYSSGDKEQLRPSFLLSSLRPSLTGARRLVETIFLGSRPWMPGTPRRLPRLPQRYWQMRPLFLELLGNHAQCPYGVLLKTHCPLRAAVTPAAGVCAREKPQGSVAAPEEEDTDPRRLVQLLRQHSSPWQVYGFVRACLRRLVPPGLWGSRHNERRFLRNTKKFISLGKHAKLSLQELTWKMSVRDCAWLRRSPGVGCVPAAEHRLREEILAKFLHWLMSVYVVELLRSFFYVTETTFQKNRLFFYRKSVWSKLQSIGIRQHLKRVQLRELSEAEVRQHREARPALLTSRLRFIPKPDGLRPIVNMDYVVGARTFRREKRAERLTSRVKALFSVLNYERARRPGLLGASVLGLDDIHRAWRTFVLRVRAQDPPPELYFVKVDVTGAYDTIPQDRLTEVIASIIKPQNTYCVRRYAVVQKAAHGHVRKAFKSHVSTLTDLQPYMRQFVAHLQETSPLRDAVVIEQSSSLNEASSGLFDVFLRFMCHHAVRIRGKSYVQCQGIPQGSILSTLLCSLCYGDMENKLFAGIRRDGLLLRLVDDFLLVTPHLTHAKTFLRTLVRGVPEYGCVVNLRKTVVNFPVEDEALGGTAFVQMPAHGLFPWCGLLLDTRTLEVQSDYSSYARTSIRASLTFNRGFKAGRNMRRKLFGVLRLKCHSLFLDLQVNSLQTVCTNIYKILLLQAYRFHACVLQLPFHQQVWKNPTFFLRVISDTASLCYSILKAKNAGMSLGAKGAAGPLPSEAVQWLCHQAFLLKLTRHRVTYVPLLGSLRTAQTQLSRKLPGTTLTALEAAANPALPSDFKTILD

SEQ ID NO: 53 - protein, 1117 aa, Tetrahymena thermophila
MQKINNINNNKQMLTRKEDLLTVLKQISALKYVSNLYEFLLATEKIVQTSELDTQFQEFLTTTIIASEQNLVENYKQKYNQPNFSQLTIKQVIDDSIILLGNKQNYVQQIGTTTIGFYVEYENINLSRQTLYSSNFRNLLNIFGEEDFKYFLIDFLVFTKVEQNGYLQVAGVCLNQYFSVQVKQKKWYKNNFNMNGKATSNNNQNNANLSNEKKQENQYIYPEIQRSQIFYCNHMGREPGVFKSSFFNYSEIKKGFQFKVIQEKLQGRQFINSDKIKPDHPQTIIKKTLLKEYQSKNFSCQEERDLFLEFTEKIVQNFHNINFNYLLKKFCKLPENYQSLKSQVKQIVQSENKANQQSCENLFNSLYDTEISYKQITNFLRQIIQNCVPNQLLGKKNFKVFLEKLYEFVQMKRFENQKVLDYICFMDVFDVEWFVDLKNQKFTQKRKYISDKRKILGDLIVFIINKIVIPVLRYNFYITEKHKEGSQIFYYRKPIWKLVSKLTIVKLEEENLEKVEEKLIPEDSFQKYPQGKLRIIPKKGSFRPIMTFLRKDKQKNIKLNLNQILMDSQLVFRNLKDMLGQKIGYSVFDNKQISEKFAQFIEKWKNKGRPQLYYVTLDIKKCYDSIDQMKLLNFFNQSDLIQDTYFINKYLLFQRNKRPLLQIQQTNNLNSAMEIEEEKINKKPFKMDNINFPYYFNLKERQIAYSLYDDDDQILQKGFKEIQSDDRPFIVINQDKPRCITKDIIHNHLKHISQYNVISFNKVKFRQKRGIPQGLNISGVLCSFYFGKLEEEYTQFLKNAEQVNGSINLLMRLTDDYLFISDSQQNALNLIVQLQNCANNNGFMFNDQKITTNFQFPQEDYNLEHFKISVQNECQWIGKSIDMNTLEIKSIQKQTQQEINQTINVAISIKNLKSQLKNKLRSLFLNQLIDYFNPNINSFEGLCRQLYHHSKATVMKFYPFMTKLFQIDLKKSKQYSVQYGKENTNENFLKDILYYTVEDVCKILCYLQFEDEINSNIKEIFKNLYSWIMWDIIVSYLKKKKQFKGYLNKLLQKIRKSRFFYLKEGCKSLQLILSQQKYQLNKKELEAIEFIDLNNLIQDIKTLIPKISAKSNQQNTN

SEQ ID NO: 54 - protein, 1447 aa, Leishmania amazonensis
MSASFPSIPGFAGPLSLKAFLEEYFGLHLTFAAETASPSPRAAATAETPSAAGFRALRDVVLPPNQSFLVVVYVALHASSSPPPTTAHASPTPATPDPGCAAPPTGLGRLRQPLAHQTAVSTAHDTCVTRCNPSDRQNPFCLSSSSTGKNGNARSPWCASASWLLYTNTSHRPFTDALLRHPWRASFSACLGPAAMGFIEMYCPIVLQLEAMAGGVQVIGPALKHVALETSFSATAQLSEMKGLPPRGSASVSSRGVKRAVDTGECSAPLPLQKQRRVEAVASPPKAGRRLQREVAPSHRPCRDDSFSSPVNRAAMPATWAAALTRTDDPRTRLYSVRVSDSDCTGDGGGALPLPAGSLEAHWLPRHPRSLHRVLQAALPKRAAYGASTRHYCAGTGERGTGCTSVKNISMWHVAHVFRWLVLQPSQSGEVAFQTTSPKFDLPSYLRRFLSTDVDQCSRLDLRGAALRHTGYLEEAFRRQQQGVEPWDVQRLSTPVDVVVSYLRTLLPTLRWAPLKEANNGLFWGRDAAGSERVLDALMRAVRGWLIAGRQAVVPVSRFLDGVPVAQVPWLNGFYTTTPSLPFSDATSSASRHARRERSQVQQRVWLQFVLFLTQDILPFLLRASFTITWSSKNTHKLLFFPAFVWRRLVRREVRRTRSCHAPRSQMSLAEERTRMSGADHAALVSAPNACGGAVAAAFPSPHSAASNASAAISAPRDEWRAVRTGGALAHWSARATLATRGGGASCLYAGVRFRPDRRKLRPIAVVRSASLRSLKEMARGSPSPYSHASAIVRLLRRLGCSDADGQLPAATATLLRQVQARSRHNRRTGVHRSAHPLPPHLPHKAALQDALRCLVSGVEEQRVRDGLPRLSNLSHQDEYAELRSFCEEVRGRHAIPCEGPAKTTPAVSSASPPGATACFAPYVTLLRSDASRCYDNLPQGRVLAAVRSLVKHDAYRVLRFTVIHAVDSEATCKGGCLLRRTFTTRTIPCAEAECGFLARIPRGHIYWEEEGRTPTGPHTSAAVSRTTDASSRCGANLISGAAVRALLSEHIRHHLVVVSGGSLFEQRVGILQGSPVAMLLCDRLFSNVVDTALSSILSEHAERSLLLRRVDDVLVATTSPAAAERCLRAMQRGWPSVGYLSNPSKLTLSKACGSLVPWCGLLLHDTTLEVSVEWRRIGVLLGSLRVGDPHYVHRGDYEPLYLTQRFLAVLQLRVAPTALCGRMNSKTRQLQTFYEVGLLWTRVVLEKVQEALPVARNCCVTVLLLRPLAVCVGRLCRLLSRHQRFLAARQSACDVSAAEVRACVLTALHRTVQAKLRVLQARTVRAMTAQSGRTQRGPSLKGRRNNFCSTKASSVGRKGCEQRRRGRNRRNTRVCLRSFWWLTAAEVESQWRRSLGALYRAAPRPGEACGSTASSPSPAASASLLMEDGPLSMHARALSATRLSQT

SEQ ID NO: 55 - protein, 1202 aa, Aspergillus nidulans
MGKKRKRPVKEPVKDDPICRAKSSPQQPAGNTARSLSTNRNQAADAGKICHPVISLYYRHVVTLRQYILQRIPRSSRARRRRIAAVGGHSAARDGLAAVPKNEKDLADLLDTTLVGILKELPPTRSEERRRDFIAFTQAQQTTQTGTDSGPIVDFAISSIFNRPSHGKLENVLSHGYRQGGGRLPCSIPNVAAQFPNKNVQMLKQSPWTEVLALLGSNGDEIMLKLLLDCGLFMAVDARKGVYCQISGQAISSLKPIDTSPEDCPAAFNGSSSPVKRHAVPWQGAAPRAHTKGPKENQQQLSPNAIIFCRQRMLYARPHLNANGGITFGLPNHVLSRFHSAKSLQQTVHVMKYVFPRQFGLHNVFTSHSSYYENPLSKNYSSREEEIARKEGLEAARNQLRKSGFHAAIGERQESIKIPKRLRGKPLELIRQLQNRSRRCCYKKLLQYYCSEELSGPWILGQLSAESNSVLSTSSSRPLVTQPSLAHQDMQRELRPTSYAKGFSKGSGATKPKENLTDHATPAASVSAFCRAVIRNLIPLEFFGVGEQGITHQKMILGHVDRFIRMRRFESLSLHEVCEGIKPESLRQAPSENNISASDLQKRRELFHEFLYYLFDSILLPLIRGSFYVTESQVHRYRLFYFRHDVWRRLTAQPLAHLRASIFEELAPETAEKLLSGKKSIGYGSLRLLPKTTGIRPILNLRRRTLVRSIYAGKNRYHPAQSVNSAIAPVYSMLNYERGRRNDLLGSSMFSVGDMHSRLKKFKESLMSRGWDQRKRLYFVKLDIQSCFDTIPQAKIVRLVEKLVSEENYHWMKYVEMRLASEFDNMWPLRKPQQRRTWSKYLQRVGPVGRPENLADAIANGSVVGRRNTVLVDTIAQKEYNGEGLLDILNEHIRNNLVKIGKKYFRQRKGIPQGSVLSSLLCSLLYAEMERDVLGFLQTDDALLLRLLDDFLLVTLDSGLAMDFLRVMVRGQPDYGISVNPAKSLVNFAAVVDGAQIPRLVDTPLFPYCGSLIDTRTLEIFRDQDRMLEGADSASVALSDSLSIDSTRTPGRSFYRKVLASIKQSMHPMYLDSTHNSLPAVLLNVYKSFVTAAMKMYRYTRSLPGRARPRPEVVVRTIHDATQLGYRLIRGRHGLCRVTHPQLQYLGGAAFQFVLGRKQTQYAGVLRWLDGTLAEARQSVGNSVLLAQAVQKGNRTYREWRF

SEQ ID NO: 56 - protein, 1158 aa, unidentified
  REGION 1..1158: note = Description of Unknown: Silkworm Pao sequence
MPITRSTGRGRIETEQSPPSETTATTQSMWTETTANTVMSLVAPTTESSCATANTEATTKLAEKPGNSKTEAVKQYIAKQNDVPTKQRAGTVKSDRSRNRKEQKIAKAREELARLQVELAAARLATLEAGSDDENSESEYSKSELDERVGTWLETQPTKTENHDRHKETPAGACDKQDFSDLTAAITLAVKAAREPRYTELPFFNGNHQDWLSFRAAYHETMNSFTKTENINRLRRNLKGRAKEAVDGLLITNADPSDVIRSLEARFGRPETIAITELDTLRALPRLTETPRDICIFSSKVTNAVATLRALNCTHYLYNPETTKTMLEKLTPTLRYRYYDFTAVQPKEDPDLIKFEKFMKREAELCSPYAQPEQAGHYSQPAQHNRRTQNVHIVSEKPSRAKCPVCSNTEHTTTDCYIFKKADSNTRWDIAKNKHLCFRCLQYKNKTHNCKPKTCGINDCKYTHNKMLHFDRKIEKTDNSDKETTENINSAWTGKQKQSYLKIIPVQVQGPIGTVDTYALLDDGSTVTLIDEIICKKTGTTGPIDPLHIQAINNIKSTETRSRRVNLTLRGLNSRKEIIQARTVNDLQVTAQKIPKEQIDEYSHLQDISDIITYENAKPGILIGQDNWHMLLASKVRRGNRNQPIASLTPLGWVLHGGRTRTLSHHINYINHASETQEDDKIENLVKQYFAMDALCITPRRPKTDPEEQALRILNSNTVHTTDGRYETALLWKTDNVSLPDNYNNSLKRLINIENKLDHNPELKQKYTEQMEALVAKGYAEPAPKTKTENRTWYLPHFAVVNPPKPEKLRVVHDAAARTRGVALNDMLLKGPNLLQSLPGVIMRFRQHNITATADIKEMFIQVKLRPEDKDALRYLWRKDQRDNKPPEENRMTSLIFGASSSPSTAIYVKNLNAQKHEATHPEAAATIQNRHYVDDYLDIFKGLKDAVLVTTDFRRKHERKPTSKTFWIDSEIVLRWTRTESRSYKPYVAQRLTAIEDSSTINERRWLPTKHNVADDVTRHVPMSYQNEHRWFRWTEFLRQRQNSWPTESASETTEPMGEVNIAAAVPAGASWPRRRHEKWKCQPRNTRMRGKSDSDISRSRQRGAHRRHQNQGWSSTETSTKTTDPAHRRRPSCTEKNATDSHGGSNVQDEIGFFIV

SEQ ID NO: 57 - protein, 1726 aa, Anopheles gambiae
MPAADKRVKMFNLKRVEIMNTLQDFEEFTKSFDATIDAYQIPSRLEQLEELVSEFTELRKAFNETVDDSEAFDIMQKDRREFNKRSHEVRAFLLKNSSHSGASSGLNTTQVNTTISAGTQNHLRLPKVDLPSFDGEITKWLTFKDRFSSMVHDSTEMPEVLKLQYLLSALKGDAAHQFEHMQITADNYYVTWEALLKRYDNSKVLKREYFKAFYSLEKMKTDSTEELARIVNEANRLVRGLERLNEPVDKWDTPLTSLLFYKLDSKTLVAWEQYSVDFKTDEFTNLVEFLEQRVNILKSSAQNICNQYSANSIMVTGRQARRDGRNVALPVQQTNNTFKGYLKCPLCNEQHPLHVCERFERASVINREEIVRKHGLCFNCLRKGHSARECRSTYVCQQCKRKHHSKLCKIGRLSEVEVVPSTSRLTATAQANCSKKTVILSTAQIIILDVNDQPYKVRALLDNGSQLNFITERVAQELRLKRARVSEQIAGVGGAIMRVAGSVVGTIRSLTTEYTTCLEFLILPKIATDLPSETMDVRGWKLPKDVRLADPTFHERGSIDMLIGADTFVEMIKAKKIKLDHELPTLLETELGWIVSGAYKHNNLNQSMACTIVSQGGENDIASLMNTFFNIEEVQDQNLWNVEERECEDHFQATTRRDENGRYVVRLPLKAERELGESKEVALRRLIGLERRFEREPKVKEAYEAFMQEYITLGHMSVRENENSSDGYYMPHHAVFKQDSTTTKCRVVFDGSCKTSNGRSLNDILKVGPTIQQDTTDILLRWRRRAIAVVGDVEKMYRQVWVHEEDRKFQRILWRSHSSEKIKTYELNTITYGTASAPFLAIRTLNQVLEDNKEKYPLAASRINDFYVDDFISGADSENEAKQLCEETKAALAMGGFPLRKWASNCPHILPSETEIDNIQRVIELKSREGAVSTLGLVWNPILDTLGVKISEPETCEIYTKRSIIRTIAKIYDPLGIVDTVKAKAKQFMQRVWSLKKENGDSYGWDEEIPQQMRQEWEVFERQLTHLQEVQVPRCVTIVGARNIQIHGFCDASEEGYGACVYVRSTNGEEIVSRLFVSKSKVTPLATKHTIARLELCAAHLLGKLLVKLKRATEDPYETFCWTDSSTVIYWLKSSPSRWKTFVANRVSQIQNATKEFEWRHVPGIHNPADAVSRGRNPAEVVEDKLWWHGPDWLVKDPKHWPKNIESGNTCETAKEEKQTKTTLTCMVKEESFINKLCERVGSFTKLKRIVAYCHRFFDRKRIHRKSYFELRELKRAEKTIIRLVQNEVYATEYECIKQGQQVVRKSPLRVIRPILDKDNVMRVGGRLSNADIKDEQKHPVIIPGKHRIAELIADKYHKILRHAGAQLMINTMQLRFWIVGARNVAKRTVFNCVKCTRCRPKLIQQPMADLPEQRVRQARPFSISGVDYAGPIMVKGTHRRAVPTKGYISIFVCFVTKAVHIELVSNLTSSAFLAALRRFVARRGHVTELHSDNGTNFRGANNKLRELYKLLNSDTHQDEVVGWCAERDMKWKFTPPAAPHFGGLWEAAVKSMKFHLKRVLGTGHLTFEDLSTLLAEIEACLNSRPITAISEDPNDMEALTPGHFLVGNHLQTVADVDIADVPTNRLNHWRLIQKHMQHIWNRWHREYLSTLQKRAKWNKNAISIEPGRLVILQEDNVAVSKWPMARVVDLHPGKDGVTRVVTLKCANGKEIRRPIHRIAPLPIES

SEQ ID NO: 58 - protein, 2330 aa, Caenorhabditis elegans
MTLGSSRSPSPGRRRHASEGGTAVPPTPANCGKPTKKRTRGQVSLATRIVGPLKRRINHKVDAAKRILAETEAKMEILLNMPQDQLVSSEDSTYLDALLIRLQTILVALEGMRDLISDKFRDTEMMVDPNRHQHHQEVLDYLEKSSTARFVDHLTHDIQQLETEMRSRNIPITHFDPSLLATTDVETGATTEDDANDEERRDIEATIEDHAQNNGPSDHRVISDLRTPHGSTPSTGTPRLSSPGMVWDNEGLSLHDELQIANLLDPANPQRSPMAPAAPTSSAAAPTQSAAAPPSSATAPMSSAAAYHLHGQHGQQLGAPAHTNGGTTHRQQPLEQRIQTTTKGVLQGKREQLKQGPTETPLLVQHAPTTTGPGTRITPQRVLNAPALQTHQVINSQVGYPSAGAHEYSAFHPLLQYAPPRGEDTLTHRLLAAIEAIATSQSQMQSELISQGRSVHVLTDRMEATEKLIVEPKILNTTVAEETSRPAMPQPTHETAQQQQTTGSEYEYEFDSDDDNNQQPLPPQPRTEIRYVEVKNNGSHDTQNLLKYLGKYDGNSNIDSFLTDFKESVMENENLNQANKFMILKTHLLGKARDCISRDHVTAKALEKTITSLKSVFGKDENKTSLLAQIHAIGFPQSDVREMRRAIAKHSILVEQLVNSGLAANDERTFTPLTSRLPPAIRTRVTQFWGSKGENATFQEIFDYVTTCVDDMARESILALRHLPTAESETEVGPLGIPYSGQINHANATTQNQGNPNGKKTSISLADKPVYKREDHPKTYYDSNTGESLPGYNAPGKQGPVLRLLPRTFPLYEGTTKKTCKACKGSHHTLRCTLSSKDFRQALNASRLCPICTGYHSVEQCRCLMKCILCQGLHHTGGTLSPTSAIPTINPLLTFLPTFSDSAHFEITSTNIYNGRRIDMILGNDLLAWLNANPETKKHILPSGRLVEITDFGHIVHPVPDKTIYQNHTQIEVTSETFMHASALINGPNPEDPNLALTLQVEQQWKLENIGIEAQPLNDHTTTSAKDLQASFENTLRYTPEGILEVAFPLNGNEVRLKDNYEVAVKRLHATVNALKNSKNPNLLKQYDEIFKTQEASGIIESVTPNMKLETKYNYNMPHRAVIKESSNTTKVRVVYDASSHAVGQLSLNDVVHAGANMVIPLFGILIRSRFIKLMIVGDLEKAFHQVQVQPEFRNLTLFLWLTDLNKPITRDNICTKRFVRLPFGMSCSPNLLASTIVHFLVHNPDELNNDILDNLYVDNILIGTNDLALIMNRITRLKQIFSHMKMNIREFVVNHDESMEKIDPKDRVSARTIKLLGMKWNSSPDADTYTIKIADVQTIMHPTKRDVASKMAETFDPLGLISPIQVSMKRLIQKLWSHEVNWKDPIPKHLLDDWQAIQASFIDRTITVPRRLTTDFEYKDIQLLISSDASQDIYAAAAYVYFSYGDDRPPVISLITSKNKIKPSRETNWTIPKLELLGIEIGSNLASSIVKELRCKVTNIRLFTDSSCALYWILSKKNTRVWVANRIDQIHLNQTRMSECGIDTSIHHCPTKDNPADIATRGMSTSELQNSDLWFNGPEFLKQKPEDWPCKIEGTFTCPAEFQAVVFAEILDPKTKKTKKPLMEKAEKPPASETVLHILELPSKFESIISFRYTNSLRKLMLVTYRTLLAISKMRKGKVPTSWILEKFMMAPNLLEKRRVARHYIFLQHYKECAEQGLTFPSSLRYYVAPDGLYRVLKQAKSPTLPAEANEPILVHPKHPLANLLMLETHEINGHLPEQYTRAALRTRYWLPNDSSVARSVISKCIQCKKVHGLPFPYPHSMTLPESRTTPSTPFQNAGLDYMGPVEYSKDDGVSTGKAYVLIYTCFTTRATILRVVSDGSTERFIMALKTIFHQVGVPKMVYSDNAPAFILGGSILNDDISTWEHHSDPLTSFMATQSIHFFRITPVSPWQGGMYERIVGLVKHQILKVCGADRFDYFTLSYIVSSAQAMVNNRPLMQHSRQPDDMIAIRPCDFLNPGVMIETPPTEFTPSAPSGVPEQRVRAHLASLEETIELLWKYWSLGYIINLRQNHHRNVRCADLKPTVGQVVLVNTNLVKRQNWPLGVIVQVNRSERTDEIRTAVVKCKGKLYKRSVCQLIPLEVQSSDMDSLPDTENREDGQECLMDAGMTVQHPSAPPLTIPSAALFDSPDEHYSPELFPRETCPNVTEATENPSPKIQNNTMIPLVPNTSTIQNARLDLHERVGEVDNFENPDLDQVHVDSKDEVEYQDPSTTEELPTAIPGRSRPILPRRVKKPVYYNYFLHTTTAVTSTFSTPECCEMIPSPNYLVL

SEQ ID NO: 59 - protein, 2037 aa, Caenorhabditis elegans
MEHLGVDPNPLHPIDQYTLLAANKILQRTKRYAEALENLRHYVDDKFQEPVLRGSPLKDVYHEQVQEHLARLQPKSLLTEAKRDITMLERELLNHGFPITTSDPQELVLTPYEYETSEDGTSSSDVDDLASFDGAFDNLRETMGSDHVQIDHQNPNPRVTIPSAILSPPTNGSSHLNYRTVSQPSPLTVHRDSALGSLSRQPSLADELQDERHQHRLSQIRLRALEDTFIARRQADEEAEELGRQQLSQYREMRAARERRLEEMRSQPSPPQAPAPAPRRPHTVHSGAEPTTPDLVPAPALTGYPTPEQLLPQAMLQAMTEMGRLISQLQRDQTQARREQTSFMNECREHLRPPAEGSIGQSAYSPDDEGEEQSQRGSSPPVQPIPDSRSPSGVINFETNAKNLPKFDGTGNFRAFRNGFDTVVLDDPRLPSVTKCNLLRNHLVGNAQQCISHDDDPLVAYQTTMDMLESVYGKGDTQRGLLERFRKLKFHQSNPEQMKLDLTSHQLLVQRLVSTGLSATDDRITMGLIGKLPISFRDKVTEFYTDMDDHPSAIAFYQRIRKHINSFENGLIAASLQPLHVAPVNEIPSHYVKGSVHVVDQKQQPKKGELRHPTSSSGGQKERDTSAFYIDPATGAQLGGHLRPGKRGVHLTLIARTFPLPDETSKKPCAACGGSHSPTRCHLTSQAFREATAQKGLCANCCGKHAIEQCKSHFTAPAFSDQDAHHLDSLEIDHLSISSQRTFDGKRIDMILGNDVLTCLHGDRHTRRHQLPSRRVVDDTRIGYIVHSVPSLILYTSDERKWVFNDQNGLTHSLMLANMVLDHQYVEDPELKLHWSIEQLWKFENLGIEPIPLVDETKKSTQDLLAEFQQNACYTNGVLEVALPFNGNEEKLKNNYAIAYKRLCSLHETLTKGKNLITKYDRVIKDQLLAGIIELVTPEMKPDSPIEYFMPHRAVIKESSNTTKLRVVLDASSPIGKDLSLNDCLHAGTNLLTPLYGILLRSRCYRYIIVADIEKAFHQVRLQVKHRSVTQFLWLADPSQPANADNVVRYRFTRIPFGVASSPFLLGAAIHHFLGRNPHRLNNEIRDNLYVDNCMLGTDDFTKVMPTAMAAKSIFRKMNMNLREFVTNCDGIMQHIRAEDRAESRDIKLLGCMWNSNETVDTYSIKIAVLDIDHPTKREVASKLAETFDPLGLVTPILVQFKRLIQQLWIAGVSWKDRIPIELLPLWRNLQKSFVDKSIHVERRLTFVNEEVIDCQLIIFTDASQDIYAAAAYAHFTYKKWPPVTRLITSKSKIKEVSAANYTIPKLELLGILCGSNLAVTLSKELRLPISSIKLFTDSSCALYWILSAKNTRAWVHNRVQKYHENCARMSECGLSTSLHHVPTKENPADLATRGMSTTELQKSLFWFRGPRFLANPPESWPQKIEGTITCPAEFQDLVYKEIIDTSTEKKKSKPLIEKAIPAAPKATESVLHLTTGPFKSFIPTLNSVCKMFPGKSWDSEIMVEFKNSESALHRRKLVRKLIILHHYRESEALGLKLPADLDYYVDSHGFYLVKKQVTSHALPQEANEPVILFKDHPLATLVMRETHVINGHSSELYTVSAAKTMFWIPHIKVLAKSVVSNCVDCKKVHGLPFRYPNSKTLPEKRTSPSKPFATAGLDYMGPIEYLKDDGVTIGKSYVLVYTCLVTRGAMLRVLPDATTETYLMGLRSIFHCVGSPTDIYSDNAAIFKLGASMLNDDILSGDELSDSLTSYLASQQINFFYITPLSPWQGGVYERIVGLLKHQLYKVSSVEKLSMFSLQYLVSGAQAMINSRPLTPHARSPNDMIALRPIDFQLPGVMLDIPFVHPTGNGRGAEERARAHLAQLETALNRLWQIWTLGYLFHLRKAKHRNKKCTSIKPAVGQVVLIDTNHVNRHKWPLGVILQVHESKRDHEVRTATVKAHGKRCLRSVCQLIPLEVQASEDFTSADPPSEGDLVELEEHDCDDPTSDIPTQAYFEHSRSTARTLLRVSPRVSEIRCLSLGRVTDSPLLVPSVNNN

SEQ ID NO: 60 - protein, 1607 aa, Drosophila melanogaster
MFIGSIASNSSLTDCQRFHYLKSYLAGDALALVKHIPVTNDNYREAWERLEQRYNKQSLIIRSFLNSFMSLPSAINSNIGTVRKIADGADEVIRGLRALNCEERDPWLIFILLSKLDSDTRQAWAQCAESEEKGVTINRFLKFLTSRCDTLEAFELTRSTQARRAATTHHADTHPRREEPKCTSCQQNHQLFKCPQFIALDIASRRDFLKSRKLCFNCLSPAHMVGNCTSRHTCRICRRKHHTLVHGSSQPIQNGNNIDTASVDSRDRPAVSHAGSTIGHNQPLAREGHRLGSETPAENNFTHHTLENIPAAGSQTLLPTILADVIDAWGNTTTCRLLLDTGSTITLASESFVQRIGVRRTHARISILGLAANSAGVTRGRAHIKLRSRHSGQTVELVSFILTSLTSSLPAQVIDTSSSTWRQICELPLADPTFCTPGAIDVIVGSDQLWSLYTGDRKHFGNDFPIALNTVFGWILAGSYSAFDDHPTSAVTHHADLDTMVRSFMEMDSIQPNQALLDASDPTERHFAATHKRSTDGVYVVEYPFKEKAPPIDSTLPQAINRFFSLERKFRRYPELKQQYEAFLDDYLQRGHMEKLTSAQVEESPDTCFYLPHHAVIKLDSLTTKCRVVFDGSGKDSSGVSLNDRLHIGPPIQRDLFGVCLRFRQHQYVLCADVEKMFRGIKVFKPHTNFQRIVWRTTENEPLLHFRLLTVTYGLAPSPFLAVRVLKQLADDHGHEYPAAAHALLHDAYVDDIPTGANTFEELMILKDELIALLDKGKFKLRKWSSNSWRLLKSLPEEDRCFEPIQLLNKSAADSPVKVLGIQWNPGKDVLYLNLKGCDATISPTKRELLSQLSRIYDPLGLVAPVTVLLKLIFQESWTSVLQWDDPIPESLRTRWRALVEDLPALTQCQVPRYIASPFRDVQLHGFADASSHAYGAVVYARVAVGCSFQVTLVAAKTRVAPIKPVSIPRLELNAALLLSRLLSIVKTSLTIPLFSTSCWTDSEIVLHWLSAPPRRWNTYVCNRTSEILSDFPRSCWNHVRTEDNPADCASRGLHPSKLLEHRLWWKGPSWLATPTSEWPPSTSKFSVSSSFDVNTEERAIKPTTLHNFPDESIHELLIHKFSTWTRLIRVSSYCHRFIHTLRSHHRNSAPFLTSEELLDAQRRLIRHVQQKSFAREYEQLENRRQLNAKSHLIRFSPFLDDYGVMRVGGRIEQSTLNYNAKHPILIPKDTPLAGLLVRHFHVSYLHTGVDATFTNLRQQYWILGARNLVRKAVFQCKSCFLQRKGTSNQIMGELPIPRVQASRCFQHTGLDYAGPIAIKESKGRTPRIGKAWFSIFVCLTTKALHIEVVSELTTQAFIAAFQRFIARRAKPTDLYSDNGTTFHGGKKTLDDMRRLAIQQAKDEELAGFFANEGISWHFIPPSAPHFGGMWEAGVRSIKLHMKRILGSKALTFEELSTVLTQIEAILNSRPLCPTGDNSLDPLTPAHFLTGSPYTALPEPCRLDMQVNRLERWNQLQAMVQGFWKRWHMEYLTSLHERTKWHLETENLKIDTLVVLKEPNLPPSKWILGRITAVHAGIDNKVRVVTVKTAHGLYKRPIAKIAVLPLC

SEQ ID NO: 61 - protein, 1240 aa, Arabidopsis thaliana
MVRGAGVRSRGRGRGRVLKGTGESDGHSAKVEQSVGSQPEFVEPGVRNGLGADIAGATGVGAGGAGVGTGVHAVGAEGPGVMGAAAGGAQVPEVGLAGLLRQLLERLPGVVPVETPVAPRVAEVQQRAAVAEEVLSYLRMMEQLQRIDTGYFSGGTSPEEADSWRSRVGRNFGSSRCPAEYRVDLAVHFLEGDAHLWWRSVTARRRQTDMSWADFVAEFKAKYFPQEALDPYAGQGMEDDQAQMRRFLRGLRPDLRVRCRVSQYATKAALVETAAEVEEDFQRQVVGVSPVVQPKKTQQQVTPSKGGKPAQGQKRKWDHPSRAGQGGRARCFSCGSLDHKDAGGQFLAVLGRAKGVDIQIAGESMPADLIISPVELYDVILGMDWLDYYRVHLDWHRGRVFFERPEGRLVYQGVRPISGSLVISAVQAEKMIEKGCEAYLVTISMPESVGQVAVSDIRVVQEFQDVFQSLQGLPPSQSDPFTIELEPGTAPLSKAPYRMAPAEMAELKKQLKDLLGKGFIRPSTSPWGAPVLFVKKKDGSFRLCIDYRELNRVTVKNRYPLPRIDELLDQLRGATCFSKIDLTSGYHQIPIAEADVRKTAFRTRYGHFEFVVMPFGLTNAPAVFMRLMNSVFQEFLDEFVIIFIDDILVYSKSPEEQEVHLRRVMEKLREQKLFAKLSKCSFWQREMGFLGHIVSAEGVSVDPEKIEAIRDWPRPTNATEIRSFLGWAGYYRRFVKGFASMAQPMTKLTGKDVPFVWSQECEEGFVSLKEMLTSTPVLALPEHGQPYMVYTDASRVGLGCVLMQHGKVIAYASRQLMKHEGNYPTHDLEMAAVIFALKIWRSYLYGGKVQVFTDHKSLKYIFTQPELNLRQRRWMELVADYDLEIAYHPGKANVVVDALSRKRVGAALGQSVEVLVSEIGALRLCAVAREPLGLEAVDRADLLTRVRLAQKKDEGLRATKMYRDLKRYYQWVGMKMDVANWVAECDVCQLVKAEHQVLGGMLQSLPIPEWKWDFITMDLVVGLRVSRTKDAIWVIVDRLTKSAHFLAIRKTDGAAVLAKKFVSEIVKLHGVPLNMKEAQDRQRSYADKRRRELEFEVGDRVYLKMAMLRGPNRSISETKLSPRYMGPFKIVERVEPVAYRLELPDVMRAFHKVFHVSMLRKCLHKDDEALAKIPEDLQPNMTLEARPVRVLERRIKELRQKKIPLIKVLWDCDGVTEETWEPEARMKARFKKWFEKQVAA

SEQ ID NO: 62 - protein, 2058 aa, Oryza sativa
MVEVLEEEVEVQTLTPSRSEGASGSRNPRHRRRGSRTPPLSDPLRREAGGALLRHPPVNVEPEAPVQRWLDDVANLVTTAQRRLAVSGRSTATGTSRTSTTLSSSARRRARRIATASRRSTAPTSSGASESRRRHDSLYGEQDARVNIERRRDERRATRMGEGASSSGVPRFSSRGGPPLTSTPGGTGYKAFVASLRNVRWPPKFCLNLTEKYNGSINPSEFLQIYTTIIVAAGGDDRVMANYFPMALKAHAVVYAFWNGVRHNRKLEKIASKEPKTTAELFELADKVAQKEEAWAWNSPSTGAAAAAAPETAPRSKRRDRRGKRKPARSDDEGHVLAADGPSRAPRRERATDGKTSYTAPSGKGRSADKWCSVHNTYRHSLADCRSVKNLAERFRKADEEKRQSRREGKALTTPANDQREESKKKAPADDGDDSEGLEFQDILCKVLRDKCGQKSAAKTCGILEFVRDNSRVRSQKAVFLMAEKPPPSPSSASPGSVKEKIQQLDLSEVNEGNVMTITLDKLTPDQKEFEAMMQQARNQFLNSFMQTRKGTVVQKYQVRVVADVPGTGSSKDGEMKQALGGSAQPSNKGATNGSAQENQGDHSQGVHGVQGDGTQGPRGGSLNQDGSASQEFFNNFQDRVDYAVHNAFINQSGVLVNTLSNMMKSIADGSIAKHQAAGPVYLPGGQLVNPRQLMRENPQHSGQVANRLTQDQVATMFLPLQPTVDLVQQQPIQQTPPIQQVVQPIQQQVVHWADLEKQFHSYFYSGVHEMKLYNLTAIKQRHDEPVHEYIQRFREMRNKFISLSLTDAQIADLAFQGMIAPIREKFSSEDFESLPHLTQKVTLHEQRFAEARRNSRKVNHVCSYMCGSDDEDDDSEIAAAEWVRSKKVMPCQWVKNSGKEERYDFDITKADKIFDLLLWEMQIQLPAGHTIPSAEELGKKRYCKWHNSGSHTTNDGKVFRQQIQSAIEGGKIKFDDSKKPMKVDGNPFPVNMVHTAGQTADGGRARGFQMNSAKIINKYQRKYNKQQEKHYEEGDDGFDPHWGCEFFRFCWNEGMRLPYIEDYPGCEQAVFKKPEGAENRHLKPLYINDYVNGKPMSKMMVDGGAALNLMLYATFRKLGRNAEDLIKTNMVLKDFGGNPSETKGVLNVELTVGGKTIPTTFFVIDGKGSYSLLLGRDWVHANCCIPSTMHQCLIQWQGDKIEIVPADSQLKMENPSYYFEGIVEGSNVYTKDTVDDLDDKQGQGFMSADDLEDIDIGPGDRPRPTFISQNLSSEFRTKLIELLKEFRDCFAWQYYEMPGLSRSIVEHRLPTEPGVRPHQQPPRRCKADMLEPVKAEIKCLYDASFIRRCRYAEWVSSIVPVIKKNGKERVCIDFRDLNKATPKDEYPMPVADQLVDAASGYKILSFMDGNVGYNQIFMAEEDIHKTAFRCPSAIGLFEWVVMTFGLKSAGATYQRAMNYIYHDLISWLVEVYIDDVVVKSKEIEDHIADLRKVFERTRKYGLKMNPTKCAFGVSAGQFLGFLVHERGIEITQRSINVIKMIKPPEDKTELQEMIGKINFVRRFISNLSGRLEPFTPLLRLKADQQSTWGAEQQKALDNIKEYLSSPPVLIPPQKGIPFWLYLSAGDKSIGSVFIQKLEGKERADVVKYMLSAPILKGRIGKWIFSLTEFDLWYESQKAIKGQAIANFIVDHRDDSIGLVEVVLWTLFFDGSVCTHGCGIGLVIISPRGACFEFAYTIKPYATNNQAEYEAVLKGLQLLKEVQADTIEIMGDSLLVISQLAGEYECMNDTLIVYNDKCQELMKEFRLVTLKHFVQEHIIYRFGIPQTVTTDQGSIFVSDEFVQFADSMGIKLLNSSPYYTQANGQAEASNKSLIKLIKRKISDYPRQWHTRLAEALWSYRMACHGSTQVPPYKLVYGHEAVLPWEVRIDSRRTELQNDLTADEYYNLMADEREDLVQSRLRALAKVTKDKERVAWHYNKKVVPKDFSEGELVWKLILSIGTRDSKFSKWSPNWEGPFQIHKVVSKGAYMLQGLDGEVYGRALNGKYLKKYYPSVWVNA

SEQ ID NO: 63 - protein, 2876 aa, Oryza sativa
MLHDDLQRGPSIIKNTPPPFVIQFGSLPPVTFFEYGSKVYMQQAQDVTQFQEAQSKKQRKRASAKAKKERRTLMLEARTLLKESVVAEIKGDIQAAQKLRVKASNRRSITASLRAPDPVATPKLPTPTVQHTEVELLEALEAVSDNLRRHISHTRRANSPHPLRNYRRKYRKVQRLHQLVSSRIAQSSLLEEDWSLDTSVLIKKVFKFPSILEPPYDLFPDEWACEPTKIKEKVRCAIMKEYWKRRDREHLVLPGSTIFVDYNTYTPRQQSTWESCLHLSAVGGSSDYNNNRFAVLRSEAPAPRSEDLRQELRELQDRMAQLGRRLQDHEAPRSSSTQAGGRSRRYQPSYHPQHDRRTLAPRRTLPSTQVMHQRQTALPPRWNRWSRHQDYPTSSRLAQEWRVREAPSSQVPPHVPSSPRREVYTQRRRETNAPNPATRQVAPPLLPTPSIPPRRQHAPTENQRKRERRRNNRYALYRELEDLVLKHTQVRVRPDGEVHQEDERIVFRISPSLERDARYNYLIARLTPKPRRTLDVADKNREQALTQPCPVTILQRGKGPVQATLGISLSTSARQSKENQSTPMEGVEQTPVEQVDKASRQEEAIINPMVDVLPQQESSSVPPARVEQVAGSKNIEDPKESIVMCSALAAHYETKPNAAWVPPPVTHDFTYPSDEEIVPNPRANFSKTFLPQLDQVASRPGANTRMKAIAIKNVEATPSQARKDLEDHVEVEDLDELESTSSSSLEVNLNLPRYNELNPSLPSDGEGYPNNFDSAPAHVTAEGDPRQHARQHAPRGENPSIGNWATMKEVFKKHFVAMKKDFSIVELSQVRQWRDEAIDDYVIRFRNSFVCLAREMHLEDAIEMCVHGMQQHWSLEVSRREPKTFSALSSAVAATKLEFEKSPQIMELYKNASAFDPTKRFNATKPSGSGNKPKVPTEANSTKVFSTAPQGQVPMIGAKNEQVGGRQRSTLQDLLKKQYIFRRELVKDMFNQLMEHRALNLPEPRRPDQVTMTDNPLYCPYHRYIGHAIEDCIAFKEWLQRAVNEKRINLDADAINPDYHAVNMVSVEPFPQKQREGRRATSWAPLAQVEDQIAKIMLTKAPATHVEASHGDNNRAWSIVRWKPQPMSFPPRRPQMKLSPHTHPTSRRWLDPSRRRPPPRFVPFSEGDESFPRRGRELPTLAQFLPKGWEQSSTSTREAKGVNNSIPTPDIAPCNVILTYNDSTSTGSDETFTGREREIFHAELDPEKTKVEEVNISLRGGKTLPDPHKSKVPNVDKPAKKASPPGEAPEAPETKTGSKEKPAVDYKVLAHLKRIPALLSVYDALMMVPDLREALIKALQAPEVYEVDMAKHRLYDNPLFVNEITFADEDNIIKGGDHNRPLYIEGNIGSAHLRRILIDLGSAVNILPVRSLTRAGFTTKDLEPIDVVICGFDNQGKPTLGAITIKIQMSTFSFKVRFFVIEANTSYSALLGRPWIHKYRVVPSTLHQCLKFLDGNGVQQRITSNFSPYTIQESYHADAKYYFPVEENKQQLGRTTPAADIIVEPGTETTPEHVYPIYYTNIAQSKTLYLNTDHLGGNFSRKRETAQKQRRCANYHHLTGKTESKQGSRACTTGSGQEESCRDRGGKSGCSVHAAPSPLHFSFYPAREEACTTMKAEPRMARLLEKAGINLQRNNRLPPPPAVCEDWWAQAEEFIKRRCKEQPKYGLGYINVDEPDDEDEVFEDDIFHCCTISTTTRGDALLQQHPFEVAAVGVEEELDVAGALKQLDDGGQPTIDELVEMNLGTEDDPRPIFVSGMLTEEEREDYRSFLMEFRDCFAWTYKEMPGLDSRVATHKLAIDPQFRPVKQPPRRLRPEFQDQVIAEVDRLINVGFIKEIQYPRWLANIVPVEKKNGQVRVCVDFRDLNRACPKDDFPLPITEMVVDSTTGYGALSGYNQIKMDLLDAFDTAFRTPKGNFYYTVMPFGLKNAGATYQRAMQFVLDDLIHHSVECYVDDMVVKTKDHEHHQEDLRIVFERLRRHQLKMNPLKCAFAVQSGVFLGFVIRHRGIEIEPKKIKAILNMPPPQELKDLRKLQGKLAYIRRFISNLSGRIQPFSKLMKKGTPFVWDEECQNGFDSIKRYLLNPPVLAAPVKGRPLILYIATQPASIGALLAQHNDEGKEVACYYLSRTMVGAEQNYSPIEKLCLALIFALKKLRHYMLAHQIQLIARADPIRYVLSQPVLTGRLGKWALLMMEYDITFVPQKAIKGQALAEFLATHPMPDDSPLIANLPDEEIFTAELQEQWELYFDGASRKDINPDGTPRRRAGAGLVFKTPQGGVIYHSFSLLKEECSNNEAEYEALIFGLLLALSMEVRSLRAHGDSRLIIRQINNIYEVRKPELVPYYTVARRLMDKFEHIEVIHVPRSKNAPADALAKLAAALVFQGDNPAQIVVEERWLLPAVLELIPEEVNIIITNSAEEEDWRQPFLDYFKHGSLPEDPVERRQLQRRLPSYIYKAGVLYKRSYGQEVLLRCVDRSEANRVLQEVHHGVCGGHQSGPKMYHSIRLVGYYWPGIMADCLKTAKTCHGCQIHDNFKHQPPAPLHPTVPSWPFDAWGIDVIGLINPPSSRGHRFILTATDYFSKWAEAVPLREVKSSDVINFLERHIIYRFGVPHRITSDNAKAFKSQKIYRFMEKYKIKWNYSTGYYPQANGMAEAFNKTLGKILKKTVDKHRRDWHDRLYEALWAYRVTVRTPTQATPYSLVYGNEAVLPLEIQLPSLRVAIHDELTKDEQIRLRFQELDAVEEERLGALQNLELYRQNMVRAYDKLVKQRVFRKGELVLVLRRPIVVTHKMKGKFEPKWEGPYVIEQAYDGGAYQLIDHQGSQPMPPINGRFLKKYFV

SEQ ID NO: 64 - protein, 1367 aa, Oryza sativa
MTPVDSMSKDPPAEAENGISTTSEPEKDPNAAKSCPSDKKHEPTRTTSEVTRTWCPIHKTRRHILQTCSVFLDVQAEIRASKERGIQRTSPPRDVYCPIHKAKTHDLSSCKVHLSAMRTSPPKVQQSQIYPRDADKEQGATTISDRFVRVIDIDPHEPSILHLLEDQASSSTSTPCDVYAIDGTSTSRDGDAETADQSVTPTPAQHIRILNAILSESPFDPVLNADLDQWTERLRESVANLSNAFAEAAARAPLEQPPTGGANGEQPEERTPHRQATPPPRGNSDLRDHLNGRREARRTQDNENRTIEKYDGSTDPEEFLQVYSRVLYVAGADDNALANYLPTAMKESAQSWLVHLPPYSISSWADLWQQFVTNFQGTYKRHAIEDDLHTLTNMIPEITDASVIRALKSGVRDHYTTQELATRRITTAHKLFEIVDRCAHTDDALRHKNDKPRTGGEKKPAKDARLSQARKRVAGVGNGRLKRSPRPECYTIHKSDKHPLETCFVFKKALTKQLALEKGKRGAASKMKWSEQKIEFSEADHLKTAVTPGRYPIVVEPTIQNIKVARVLIDDGSSINLLFASTLDAMGIPRKQITFDVAEFDAAYNAIIGRTALTKFIAASHYAYQVLKMPGPKGTITIQGNEKLAVQCDKRSLDMVEHTPNTPATAEPPKKPFDMPGVPREVIKHKLIVRPNAKPVKQKLRRFAPDRKQAIREAIRKWRMCIDFTGLNKACPKDHFPLPRIDQLVDSTAGFQGALNDQLGHNVEAYVDDIVVKKKTSDSLIDDLRETFDNLRRYRLMLNPKKCTFGVPSGKLLGSLVSERGIEVNPEKIVGHREREIAHKTQGSPEANWMHGGTKQEAEDAFIALKHYLSNPHVLVAPQPNEELFLYIAATPYSPTVTAVSSFPLGEVVRNKDVVGRIAKWVLELSQFNVHFVPQIAIKSQVLADFVADWTMPENKSDSQTDSETWTMAFDGALNSQGPGAGSILTSPSGDQFKHEIHLNFRATNNTAEYEGLLAGIRAAAALGVKRLIVKGDSELVANQVHKDYKCSSPELSKYLAEVRKLEKRFDGIEVRDIYCKDNIEPDDLAWRASRREPLEPSTFLDVLTKPSVKEANNEEAEKITRQAKIYCMIGNDLYKKASNGVLLKCLWSDDGKHLLLDIHEGICESHAGGRKLRCEACQFHSKHTKLPAQVLQTIPLTWPFSCWGLDILGPFPRGQGGYKFLFVAIDKFTKWTEVTPTGEIKANNAINFIKGIFCKYGLPHRIITDNCSQFISADFQDYCIKLGVKICFASVSHPQSNGQVERENGIVLQGIETRVYDRLMSYDKKWIEELPSILWAVCTTPTTSNKETSFFLVYGSEAMLPTELRH

SEQ ID NO: 65 - protein, 1227 aa, Oryza sativa
MTEKLPPSPGTGVKPPVNKTEAKNPSAEVDPSNIVPITLDRLTAEQRDELEQMMSNVKNKFMDSFQETRRETIPMRSARVHLKVTKVLQLAQVTKVTFLKMWADLEKQLHSYFYSGIHEMKLSDLTAIKQRHDESVQDYIQRFREMRNRCYSLSLTDSQLADLAFQVLIAPIKEKFSAQDFESLSHLAQKVTLHEQRFAEAKKNFKKINHVYPYMCDSDDEDDDSEVAAAEWVKRKKVIPCQWVKSSGKEERFDFDITKADKIFDILLREKQIQLPAGHIIPSAEELGKRRYCKWHNSGSHSTNDCKVFRQQIQAAIEGGKIKFDDSKKPMKVDGNPFLVNMVHTSERAADGGSNRKFQVNSARIISKYQRKYDRQQGEYHEEDGGFDPHWDCEFFRFCWNEGMRLPSIEDCPGCSNAGNSSRSYSRAEFEAKQADVDDVEEASAKVVLSPEQAIFEKPEGIENRHLKPLYINGFANGKPMSKMMVDGGAAVNLMPYATFRKLGRNPNDLIKTNMVLKDFGGNPSETKGVLNVELTVGSPGDRPRPTFISKNLSSEFRTKLIELLKEYRDCFAWEYYEMPGLSRSVVEHRLPIKPGIRPYQQPPRRCKADMLEVVKAEVKHLYDAGFIHPCRYAEWVSNIVPVIKKNGKVRVYIDDEVVISKEIEDHIADLRKVFERTRKYGLKMNPTKCAFGKLEPFTPLLRLKADQKFTWGAEQQKALDNIKKYLSSPPVLIPPQKGISFRLYLSAGDKSIGSVLIQELERKERAIFYLSRRLLDAETRYSPVEKLCLCLYFSCTKLRHYLLSNECTVICKADVVKYMLSAPILKGRVGKWIFALTEFDLRYESPKTIKGQAIADFIMDHRDDSIGSVDIVPWTLFFDGSVCTHGCGIGLVIISPRGASFEFAYTIKPYVTNNQAEYEAVLKGLQLLKEVEADAIEIMGDSLLVISQLAGEYECKNDTLMVYNEKCRELMSGFRLVTLKHVSREQNVEANDLAQGASGYKPMLKDVEIEVATITADDWRYVVFQYLQNPSQSASRKLCYKALKYTLLDDELYYRTIHGVLLKYLSADQAMVVMGEIPPYKLVYGHEAVLPWEVRIGSRRTYLQDELTTDEYYNLMADEREDLVQSRLRALAKVTKDKERVARHYNKKVVPKSFSEGELVWKLILPIGTRDNKFGKWSPNWEGPFQIHKVVSKGAYMLKGLVGKVYGRALNGKYLKKYYPNVWVNL

SEQ ID NO: 66 - protein, 1535 aa, Oryza sativa
MAAEEGAEPSASVAEDGEAQAPSQPPSAPAPSQPSSAPATSVQVPNTADVAKAATAARALQTKAEILSTNQLVVPQAAPSQPAAPTALAVVQAQISLDPEAQAEADMEAMRQNMTRLQDMLRQMQEQQQAYEVTRWTKATSAPILQYSAGYAPPQVRPQVVTQPSPPLAAQPPVYFAGQHQPSGQATQTVAEGASALQAQLQVFHRQLNQPHYISSTTPSAHPVPTIRQQVPTRGFGTNQAPIQAAMTWLQPIFDPSMAAQQVPPVGAGQPNAMAQLHAQAAISPFATPYPQQGAVNRAGGEKGLPLSGGIKTRPIPPQFKFPPVPRYSGETDPKEFLSIYESAIEAAHGDENTKAKVIHLALDGIARSWYFNLPANSIYSWEQLRDVFVLNFRGTYEEPKTQQHLLGIRQRPGESIREYMRRFSQARCQVQDIIEASVINAASAGLLEGELTRKIANKEPQTLEHLLRIIDGFARGEEDSKRRQAIQAEYDKASVATAQAQAQVQIAEPPPLSVRQSQSAIQGQPPRQGQAPMTWRKFRTDRAGKAVMAVEEVQTLRKEFDALQASNHQQPARKKVRKDLYYTFHGRSSHTTEQCRNIRQRGNAQDPRLQQGTTVEAPREAVQEQTPPVEQRQDVQQRMGLPTQALTPAPTSLRGFGGEAVQVLGQTLLLIAFSSVENRREEQILFDVVNIPYNYNAIFGRATLNKFKAISHHNYLKLKMPGPKGVIVVKGLQPSAASKRDLAIINRAVHNVETEPHERPKHTPKPTPHGKVAKVQIDDFDPTKLVSLRSPRLKLRKMSADRQEAAKAEIHMNPLNIPKTSFVTPFGTFCQLRMPFGLRNAGATFARLVYKVLGKQLGRNVKAYVDDIVVKIHKAFDHANNLQETFDSLRAAGIKLNPEKCVFSVRAGKLLGFLVSERGIEANPEKIDAIQQMKPPSSVHEVQKLAGRIAALSRFLSKAAERGLPFFKTLRGAGKFNWTPECQAAFDKLKQYLQSPPVLISPPLGSELLLYLAASPVAVSAALVQETESGQKPVYFVSEALQGAKTRYIEMEKLAYALVMASRKLKHYFQAHKVIVPSQYPLGEILRGKEVTGRLSKWAAELSPFDLHFVARSAIKSQVLADTTEYEAILLGLRKAKALGVRRLLIRTDSKLVAGHVDQSFEAKEEGMKRYLEAVRSMEKCFTGIMVEHLPRDQNEEADALAKSAACGGPHSPGIFFEVLHTPSVPMDSSEVMVIDQEKLGEDPYDWRTPFVKHLETGWLPVDEAEAKRLQLRATKYKMVSGQLYRSGVLQPLLRCISFAKGEEMAKEIHQGLCGAHQAARTVASKGLDIIGPFPVARNGYKFAIVAVEYFSRWIEAEPLGAITSAAVQKFVWKNIVCRFGVPKEFITDNGKQFDSDKFREMCEGLNLEIRFVSVAHPQSNGAAERANGKILEALKKRLEGAAKGKWPEELLSVLWALRTTPTRPTKFSPFMLLYGDEAMTPAELGANSPRVMFSEGEEGREESLELLEGVRVEALEHMHKYTTSTSATYNKKV

SEQ ID NO: 67 - protein, 1254 aa, Oryza sativa
MKEQFGLRPKDAGNLYRQPYPEWFERVPLPNRFKVPDFSKFSGQDSTSTYEHISQFLAQCGEASAVDALRGMIAPIMEKFSSEDFESLSHLTQKVTLHEQWFAEARRNSRKVNHVCPYLCGSDDEDDDSEIAVAEWVRSKKVVPCQWVKNSGKEERYEFDITKADKIFDLLLREKQIQLLAGHTIPSVEELGKKRYCKWHNSGSHTTNDCKVFRQQIQAAIEGGKIKFDDSKRPMKVDGNPFPVNMVHTTGRIADGVRTRGFQVNSAKIINKYQRKYDKQQEKHYEEDDDGFDPHWGVSLLRIRKKVSKIEKPERFQEVEQEINYRLKRTKPKQEWRVKKQAPVADEAAVDAAKRLAKGKSVVIASVNMVFTLLAEFGVKQADVDEVEEESAKLFLSPEQAVFEKPEGTENRHLKPLYINGYVNGKPMSKMMVDGGAAVNLMPYATFRKLGRNTEDLIKTNMVLKDFSGNPSDIKGVLNVELTLGNKTIPTSFFVIDGKGSYSFLLGRDWIHANCCIPSTMHQCLIQWQADKIEIVPADRSVNDCLSGKFWDGDFLKVFDFDIQPVEDGEPKLLFWGRRVYTKDTIDDLDDKQRQGFMSADDLEEIDIGPGDRPKPTFISKNLSAEFRTKLIELLKEFRDCFAWEYYEMPGLSRSIVEHRLPIKPGVRPHQQPPRRRKADMLEPVKAEIKRLYDAGYNQIFMAEEDIHKTAFRCPGAIGLFEWVVMTFGLKSAGAMYQRAMNYIYHDSIGWLVEVYIDDVVVKSKEIGDHIANLRKFLRFLVHERGIEVTQRSVNAIKKIQPPENKTKLQEMIGKINFVRRFISNLLGRLRHYLLSNECTVICKADVVKYMLSAPILKGRVGKWIFSLTESDLRYESPKAIKGQAVADFIVEHHDDSIGSVEIVLWTFFFDGSVCTHGYGIGLVIISPRGACFEFAYTIKPYATNNQAEYEADLKGLQLLNQLAGEYECKNDTLMIYNEKCQELLKEFRLVTLRHVSREQNTEANDLAQGASGYKPMIKNVEVEVATITADDWRYDVHQYLQDPSQSASRKLRYKALKYTLFDDELYYRMVDGVLLKCLSADQAKVAIGEVHEGICGTHQSAHKMKWLLRRAGYFWPTMLEDCFRYYKGCQYCQKFGAIQRAPVSAMNPIIKPWPFRGWGIDMIGIINPPSSKGHKFMLVATDYFTKWVEAIPLKKADSGDAIQFVQEHIIYRFGIPQTMTTDQGSIFVSDEFVQFADSMGIKLLNSSPYLCTS

SEQ ID NO: 68 - protein, 2302 aa, Medicago truncatula
MDYLEQENRVLREEMTAMQTRMDEMAELIKTMAEAQTQAQAQIQAQAQALAQAQTQAQTLTEAQARSQAPPPPPPVRTQAEASSSWTLCADTPTQSAPQRSTPWFPPFTAGEIFRPITCEAQMPTHQYTAQTPLPAMRVTPATMTYSAPVIHTIPQTEEPIFHSGNAEAYEEVSDLRAKYDELRRDMKALHEKGKFGKTAYDLCLVPSVQVPHKFKIPDFEKYKGSSCPEEHLKMYVRRMPAYAQDDQILIYYFQESLTGPASKWYTNLDKTRVQTFRDLCEAFVEQYSYNVDMTPDRSDLQAMTQGDKETFKEYAQRWRDTAAQVSPRIEEKEMTKLFLKTLNHFYYKKMVGSTPKSFAEMVGMGVQLEEGVREGRLVKNTTPASGTKKTGNHFPRKKEQEVGMVTHGGPQQTYPAYQHIAAITPTSHPFQQTNNHPQIPQYPQMPQYPQIPQYPQFPQNPSPQNTQQQNIQQQNFQQQPYQQYPYQQYPQQYFQQQPYQQRPQQPRPPRMPINPIPVTYAELLPGLLKKNLVQNRTAPPIPEKLPSWYRLDQTCDFHEGGRCHNIETCYAFKSAVQRLINDGKITFTDSAPNVQTNPLPNHGAATVNMIENCQKTRPILNVQHIRTPLVPLHAKLCKVDLFEHDHDLCEICLMNSGGCQKVRNDIQGLLDRGELVVERKSDDVCVITPEGPLEVFYDSRKSTITPLVICLPGPLPYASEKAIPYKYNATMIEEGREVPIPPLSSVDNIVEDSRVLRNGRVVPIVFPKRIDATTNKELRTKDADVAKEVDQPKEAGTSAEFDEILKLIKKSEYKVVDQLMQTPSKISIMSLLLNSEAHKDALMKVLEQAFVDYDVTVGQFGGIVGNITACNNLSFSDEELPAEGRNHNRALHISVNCKTDALSNVLVDTGSSLNVLSKTTYTQLAYQGAPLRRSGVMVKAFDGSRKDVLGEVILPITVGPQVFQVNFQVMDIQASYSCLLGRPWIHEAGAVTSTLHQKLKFVKNGKLVTVNGEEALLVSHLSSFSFIGADDVEGTPFQGFTIEDKNAKRNEASISSLRDAQKVIQAGGSTSWGKLIELPENKHREGLGFFPSTGLSTAKKGTFHSSGFIHAIIEDDPESVPRGFITPGVSSHNWVAVDVPFVAHLSKLEIDEPVEQHNPMISPNFEFPVYKAEEEENEEIPDEISRLLEQERKTIQPYGDELEVINLGTKEDKKEIKVGASLETSVKKQVIELLKEYVDVFAWSYRDMPGLDTDIVVHHLPLKPECPPVKQKLRRTRPDMALKIKEEVQKQIDAGFLVTSNYPQWLANIVPVPKKDGKVRMCVDYRDLNKASPKDDFPLPHIDVLVDSTAKSKVFSFMDGFFGYNQIKMAPEDREKTSFITPWGTFCYKVMPFGLINAGATYQRGMTTLFHDMIHKEIEVYVDDMIVKSITEEDHVKYLQKMFQRLRKYKLRLNPNKCTFGVRSGKLLGFIVSQKGIEVDPDKVKAIREMPAPRTEKEVRGFLGRLNYISRFISHMTATCGPIFKLLRKEQGIVWTEDCQKAFDNIKKYLLEPPILIPPIEGRPLIMYLTVLENSMGCVLGQQDETGRKEHAIYYLSKKFTECESRYSILEKTCCALAWAAKRLRHYMINHTTWLVSKMDPIKYIFEKPALTGRIARWQMLLSEYDIEYRSQKAIKGSILADHLAHQPLEDYRPIKFDFPDEEIMYLKMKDCDEPLFGEGPDPDSVWGLIFDGAVNVYGNGIGAVLLTPKGTHIPFTARLRFDCTNNIAEYEACIMGIEEAIDLRIKNIEIYGDSALVINQIKGKWETLHAGLIPYRDYARRLLTFFNKVELHHIPRDENQMADALATLSSMIKVNHHNDVPLISVKFLDRPAYVFAAEAVFDDKPWFHDIKVFLQTREYPPGASNKDKKTLRRLSSNFFLNGDILYKRNFDTVLLRCVDKYEADLLIHEIHEGSFGIHPNGHTMAKKILRAGYYWMTMESDCYKHTRKCHKCQIYADKIHMPPTTLNLLSSPWPFSMWGIDMIGRIEPKASNGHRFILVAIDYFTKWVEAASYANVTKQVVVKFIKNHIIYRYGIPNRIITDNGTNLNNKMMKELCDDFKIEHHNSSPYRPQMNGAVEAANKNIKRIVQKMVVTYKDWHEMLPFALHGYRTSVRTSTGATPFSLVYGMEAVLPVEVEIPSLRVLMEADLSEAEWVQNRYDQLNLIEEKRMTALCHGQLYQKRMKQAFDKKVRPREFKEGDLVLKKIFSFQPDSRGKWAPNYEGPYVVKRAFSGGAMTLQTMDGEELPRPVNIDAVKKYFV

SEQ ID NO: 69 - protein, 1800 aa, Oryza sativa
MTKQSSSKTEVEPTNVIPITLDDFEGEDCKSMKEYIKEITQEALMRACTRTRQGMIIKPGPRPKLTLDLVSNEEVTQSIQQQVASTIDSSMIIFKNKLDATIEGRFDEFLRTKFGPLMADFMLKDKASTSASQAPIDQTSRRTDGAAQTAGPTGPDGRSDRILPRRLDRDSGRSDRASGRRSDRALDRTFDSPVSTVATNSQVPPHVPNAYNDVARGYPPDTRQGQYNHITPQTQPIRPPNPPPNQHRPDNMEEIISGIIRDKFGIEARNRAKVYQKPYPDYYDNVPFPRGYRVPEFTKFSGEDSRTTWEHRFRDVRNRCYSLNITDRDLAGLTFNGLIAPLRERLDGQQFLDVSQLMQKALAQESRVKDNKKFVRPYEKKPNVNLIDYPEASDSEGEGDHDMYVAEWSWTNKNKPFVCSNLMPTPRKDWQSEVQSAIDEGRLKFTDSSKMKLDHDPFPVNTINFNDKKMLIRPEQAESTKGKGVVIGEPRPKMIVPKKPENRANEEKREGKRITVEARTSEVITIKVGSHDVPIPSGDEVGESSSNKPKAGTSSSQSAGLTRPSGRSDRSHTAGLTGPSGQSDRRPNDGPTDAPGRSDSRHHVGPTGAPGRSDRWSKSGLTGLQHRFDGRFTKGSAGTSSSSSRPNRGHYLPPGTEPKPRRFNELRPPPVWRRKSVEKEEPIVVEKKEKQSVDKDESSLKEDMDINMVCMLPMEFCAVDEAEVAQFSLGPKDAVFEKPDESNRHMKPLYLKGHIDGKPVSRMLVDGGAAVNLMLYSLFKKMGRGVDELKKTNMILNGFNDEPTEAKGIFSVELTVGNKTLPTAFFIVDVQDFDKVEKLGQGFTSADPLKEVDIGNGTKPRPTFVNKNMRADYKVKIIKLLKEYVDCFAWKYHEMPGLSRELVEHRLPIKPGFRPYKQPPRHFNPLLYDRVKEEIDRLLKAGFIRPCRYAEWVSSIVSVEKKGSGKIRVCIDFRDLNKATPKDEYPMPIADMMINDASGHKNAGATYQRAMNLIFHDLLGIILEIYIDDIVVKSDGMEGHIADLRLAFERMRQYGLKMNPLKCAFGVSAGRFLGFMVHERGVEIYPKKIEKIRDFKAPICKKEVQKLLGMVNYLRRFIFNLAGKIDAFVPILHLKKEADFTWGAKQQEAFEELKRYLSTPPVVRAPKAGKPIRLYIASEDKVIGAVLTQEEDGKVYIITYLSRHLLDAETRPILSGRIGKWAYALIKYDLAYEPLKSMRGQIACDFIVDHHVDIAYEEDVCLVEVIPWKIYFDGSSCKEGQGIGVVLFSPNGMCYEASVRLEYYCTNNQAEYNALLFDLQVMEMVGAKYVEAFGDSELVVQQVAEVYKCLDGSLNRYLDSCLDIIANFDNFAIRHIARHDNSRANDLAQQASGYDVKKGLFLLFEEPMLDFKFLCEIGEIGDQGRSDRRCAAGLTGDQVQSDRPHAADLTGDPGRSDRPCMAGLTGSGQGAGGHATINLEAKLIVNSDICAQETEEDWRIPLIRYLKDPTLKVDWKIRRQAFKYTLLDEDLYRQNIDDVLLKCLDEDQSKVAMGEGHRFVLVAMDYFTKWAEVVPLKNMTHTEIIDFILKHIIHRFGIPQTLTMDQAKSSNKTLLKLIKKKIEEHPKRWHEVLSEALWAHRISKHGATKVTPFELVYGQEAILPVEVNLGSLRYIKQDDLSGEDYKTLMGDNLDEVIDKRLKALEEIENEKKRVAKAYNKRVKVKLFQVGDLVWKTILSLGTRFREFDSRYSSKRQRGMCLHPNLASKVKIGKVAKIWKSTGFLRVGRSDRRVLGGQTAG

SEQ ID NO: 70 - protein, 414 aa, Coccidioides immitis
MQHYHDTIQQENQLIPSFFTYIAKLKQDLDSLPDEFFHKRRSKVKDYPQTKKTPVKPLPKISEEEHKQQIDEELCLRCGQPGHKTKFCTNSSNKSQQTDKKNKNQAKTRTAKPMQDPGQTLERQGVNPIKKASRCKQAALLDSGTTVNSISYKLASQLDWDQPETPMEVIEMLNRAEADWYSIYKTQLTITDSMGTIKMKKYYCPSRQRFYKNDILIFSASEKEHEKHVRLVMEYLREYQLFAKLAKCAFKRQTISYLGYIIDNEGIKMDPKQIQVITEWLLLQSFHNIQIFLGFANFYQRFIQKYSVIVALLTDLLKSSEKRRKKEPFLLTPTTRKVFCELQAVFFREPVIQHYNPECRIHLETDTSEHAAEMVQGRPGGTKIIDVLNLLLEAQGDDSSVQARFTKTESQQSE

SEQ ID NO: 71 - protein, 678 aa, Yarrowia lipolytica
MNSSDSTNNTSPHSSATCSTAPTTSSVPAVTFLPTPQSPDFSHEHARYLNWLRSIYPVHTIPIFTGDAVLVSQNAQLAHDWLIAVENFLCTFPVPHHARPHLLGSRLFGSAGLWWRQSMAKNILSNWHEFKSNFASYWCPEFNSQTESHFFHKVRQGVAETAAEFAQRRLQVGKMAGVPKTYHVSLRRSRKLIYDPDNQVYLCMVKPRRDSEAVSREELELISKNKDIVVNTPPDLAKSPFCVNYGLCRHETEFVEYHVNRMLEEGLVDPTQSVYGAPVLIIISKDGEFRMCTDHRILDDRSINDRFWLPKTDEILSQIGHNGVFSKLHLFSGYYQAFKKPTGLSNNVISIFPLDLREDRDNHLGLSEVLDQLGGCLSGVAFDEFDNLIVCSKDRETHTADLDNVLRVLRQRHIYVNKYQSDMFKSSLELLGHIVDKQTCRPDPLKVCTIVNWRAPLNTTDTASFLHLAGYYRRYIPDFALVARPMALLCGGNKPFDWTEKCQSAFDLIKTTLVRAAPVRLETLRGAYRLSTEIFETCFSVVLEQQDASGMFHVVDRKSARFHGLELRFTEYEKNVKAIVYALRKWRIGHGLFLIQTRFPLSRDIILNPAYLKGSSLSRWLHFIHAHQFEVADISQNKMQKNGTDGLKRGVEVDGKMGVDNVVDSGANSLAKRVCVEN

SEQ ID NO: 72 - protein, 1800 aa, Oryza sativa; identical to SEQ ID NO: 69

SEQ ID NO: 73 - protein, 982 aa, Ustilago hordei
MHLPSATLDANPRMFKPRLYRVSPCDRQAIDLVFDELTWQGHLTTAPPGTPCSWPVFVVYHEGKPCPVVDLRQLNDVVDPDVYPLPTPDKLREKLAGAKYITMFDLCKAFYQMLLHPDDHWKATVLTHCGQETLSCTIMGQSHSVSFLQQVLTEAFKVDRLSTMAFVYVDDFGVHSNSLDEHMDHIHTVLGVIQTLGLTLAQDKAHVACKEVPLLGHLVSRQGTRTMPSKCEAIKSIPYPAMLNQLEHMVGFFSYYKNYVPHFSALIAPLQHLKTTLLRLSPKTRQARKCYCTGMSVPDDTSTRQSLTKLKTILQDWALQFPDYSQPFLLYVDTSQQHGFALALHQNHQDSGIGDSIQCIDAIHLNSTDASAKAPVWFDSHALKPAEKSYWPTELEAAAAVWALFRMKRFLDALPGPHLLFTDHLAVTSIADAKPFSSTPAARNPRLVRFTLILAEFCPKLWILHRKGIYMAHVDALSRIQASETELASFHAHELIIDPGLIAHILQSQQSDSMLQLLHQELTATGKGTLPFDNGSFGLNADNILCRITPSGVWKPCIGTAALPRIIGLVHTGHLGTKATFDRFRAVAYAPHLLCHVEDFVKCCTQCQQMRTLHHWPYGSLQPLPAPDTPFTTISCDFIVCLPLACTLFDLDPVDTVLILTDTATCRIYLLSSTTTWSTERWSLRYVEQLLPHVGWPKKIISDRDLQLTSQFWCSLNTCYSCELIFSTAHHKSNGQSKRAIQSVELLLRGLCNAWSDDWADHLPLVELLLGNRPNASMNAAPNDLLYGLRLHDPFTMLQLVMSLSDLTLLDCCLALCQQALDHLALVQAYMHQWYNSLHTPPPKLAISDWVWLELHDGYLLPPSFLPPDQRLGIQHIGPYPIKHMVSNLAYEISLPLESHLHPVISIQHLEPYMPSDKPITTSLVTEILKEHKTHCCSKQYLVCFEHASCDKWVLENTVTNPAILEQWHLRRPLLPPSASPD

SEQ ID NO: 74 - protein, 2101 aa, Chaetomium globosum
MTGDFYKRAFWKRTILNPGLRHRSSRLNYRVTHLDEACGDRWAETPDDVDRNYQWQWDGYPYPQLLPVAQNGWLKIREPATPLRQTVPHLARIRRAISPRIGSCQPLRHTRHLQHHQQSDDPMPTPAVDRQLRARQLLRFVGTDHPHVTHVDRKDIDHARSFYSWFKKWRPVTTTSTPSISSVGSNNHHQAVTTDCPSERNNQPVETASNASEEISTPTLYTHASSTRPSSPTPTTSDLPSTGNTPKTSTYRRSTSTDNNVDMADNGRRQPVPDPDGPLTAQAAAALMAAAFRQHRENQNADMGNLLAAAIDHQQRQQPAASTALQAVDVGYFDPSAKDPSGAGLISGGKINKYTDIFPFCDRLVDLAATHGDDAVRRIWSQCLQGPALVWHSHILTDDDRELLRTATINAICNKLKSRFKIDYSVALDTLKQSRFTMSDVANDKDIMAFVQTMMRNAKACDMSRHGQLIAAFEALDGDIQSELDKPTSTTEIDSFLRQIQERESVLRKRAQRFRQPQQPYRQHHIGIRGNNNNSHSGTVINNNGINHKAKIRGQGLQPQGQQWQYNQYNVGNQPANNQRQYGQQQQQAQQPGAVVPENRRLPAPPQRNQYRPPTPGRAIPAFHGSAQYQQPSVEDAPEQDVAGPDDFGPAESYYGNAPYPDDEYPAAPEWLDVDHRGPDTDTTDTPDDVVAQFVSLSIASKCRHCAKSFPSNNKLMAHIYADHLKRPRPDRKARADTAGAIPSAREVVDAHLAEAHPVADDPMHLSKIVESKNHPRPRSRLYRNVGRQAMVGRPHTVIRHRASPLMVRGIGKGVHNTLDYAIIDLNFYGTLPSGSTAIASFTREVTIVDDLRANMLLGMDCMTPEKFDILLSDEAIVINSCGGIRIPITTKRHGKPIKSKVIAKHRISIPPQTLASIAVNHAVHVDDGQTLLFEPATLNVSVFAAVADCHMESAIVRNDTNRPITVHANQCVGHLVSMEPDCQAYLVDDAAAAELAVHKPAPPPEERRLATMTEDDIKLNTIQHPCGVTIYNLPPAQMAPLWSLVTEYQDVFKDKGFVNLDQDQWMRVKLRPGWHETLPKKCRIYPMNAEDRGVVKDTIGKLESGGKATKTRFQVPFSFPVFVVWRTMPDGTRKGRMVVDIRMLNKIVLPDAYPMKSQDDIMARLANAKYITILDAVAFYYQWLVDPRDRWVFTMNTPEGQYTFNCVVMGYRNSNAYVQRQMNLLLKHIDAADAYCDDVAIGSRKFDTDDGHLAHLRRVFDALRRRNISIGPSKSFIAFPSATVLGRMVNSMGMSTTTERLSAITKLNFPATLKDLEYFIGATGWLRHNVPLYSILVEPLQRRKTALLKTRNRKGKRRSWSHAVQLLLPTSEELASFEAVKAALSRHTTLAFFRDADPFCIDVDVSALGIGAEVYHIEPAALQKVTKDGLIVKYPPRTAIQPLAYLSRTLSLAERDYWPTEMEVLGLVWVLAKCKRWITATKSSPLYVFTDHKSILGLNNRTADITSSTSTTNKRLIRAAEFFSTFDLRIQHKPGKFHVVADALSRLPSTNNVTDPQAPGGLDNLPNDREEHWAFCAATAPLRLPSIRTFPEPADKDVDLGQPTATTTSGIVTLDIHPEFVERLQEGYLQDPVWKRTMTVIRQNNSLLPANRANLPFELHKGLLWKTGGQVPRLCVPRTCLTDILNAIHDGNHRGFQALRTRLSNFCISQPTKMLRAYVNACPQCKANDRRHHSPYGSLQPLTGNECPYYMITIDFIVDLPTSTDKLDVALVIVDKLSKETQIVLGKSTWKSSHWGPQLLNRLLTANWGLPKVILSDRDPKFTAALWRAIWKTLGTNLLYTTAYHPSTDGQSERTIQTIESALRHYIQALDDFTRWPETVPRLQFEHNNIRSRTTGKSPNEIVKGFNPVAVADVIGDHQPARDPNLPQLRMEAHDAVAIAAMTMKHYYDRRHMPRFFDVGSKVWLRVHKGYNMPATDLIGPKFSQQYAGPLEVVERVGRSAYRLRLPPSWRIHDVVSIDHLEPHTFDPYGRQLPAIQPVTTHNQTVKAIVSHRLRGNGNQYLVKYDGLGAEFDQWLPEQRLASIAPGILQQWLQQQQHHK

SEQ ID NO: 75 - protein, 287 aa, Coprinopsis cinerea
MPAITQYDPALPLFQPIGRTNNNITINPIACPVYRKLSHDDFLLAVDANGTETACIRQETAVSLWTTLKDIGLAINKAGNPGRNEAVHLLNQYYEIPHYKFDRLGLQRPLILDLVRPNLHNIFNPLYAWGPKEYLTKTYQALQIVGRVALRWIDDAKKVCQELGPDCGWDWEEGNEIEEEAPPMPIQAHPLNPYNDLTTRDPRVRPYPARQEIRNSTNRDLILHPTASSAARANMQIVVHPNRSNAARANNSVTIYRRGNRMARASAYSTDGSEYVIRNGKQTNTNF

SEQ ID NO: 76 - protein, 2876 aa, Oryza sativa; identical to SEQ ID NO: 63

SEQ ID NO: 77 - protein, 1412 aa, Arabidopsis thaliana
MSKEVGATPGLVPTHSPEVQGPKSYANVVSSRPSLTKFNVDVSVVDGKSMVVVPDVVLEDSVPLWDDFLVGRFPSSAPHIAKIHVIVNKIWNLGDKSIRIDVFAVNDNTVKFRIRNASARLRALRRGMWNICDLPMIVSKWTPIVEDAQPEIKSMPMWVVIKNVPYSMFTWPGLVAVGNDLVESVPLVDSQALEVVKGDIAEEVEEGEIASNSNQKSVQGEKIQEEGDWLTVSSSGGKKYISKVRKDFNLWSILEEVQNEDSVGKETEDSVKGVLEVVVVEGKEEMALNKTQQVKSCFDGASTRVSIPRSSKKAHKFVSVPNQKATDVLPRQFGCVLETRVIESKVPVIFAKVFKDWQMVSNYEFNRLGRIWVVWSSSVQLQVIFKSSQMIVCLVRVEHYDVEFICSFIYASNFVEERKKLWQDLHNLQNSVAFRNKPWLLFGDFNETLKMEEHSSYAVSPMVTPGMRDFQIVVRYCSLEDMRTHGPLFTWGNKRNEGLICKKLDRVLLNPEYNSAYPHSYCIMDSGGCSDHLRGRFHLRSAIQKPKGPFKFTNVIAAHPEFMPKVEDFWKNTTELFPSTSTLFRFSKKLKELKPILKDLSRNNLSDLTRRATYAYEELCRCQTKSLTTLNPHDIVDESLAFERWEKERHLLNAIHEVMDPQGTRPPNQDDIKIEAVRFFSDLLSSQPSDFTGISVDELKGILQYRYSLHEQNLLVAEITEAEVMKVFFSIPLNKSPGPDGYTVEFFRETWSVIGQEVTMAIKSFFTYGFLPKGLNSTILALIPKRTYAKEMKDYRPISCCNVLYKAISKLLANRLKCLLPEFIAPNQSAFISDRLLMENLLLASELVKDYHKDGLSPRCAMKIDLSKAFDSVQWPFLLNTLAALDIPEKFIHWINLCISTASFSVQVNGLRQGCSLSPYLFVICMNVLSAMLDKGAVEKRFGYHPRCRNMGLTHLCFADDIMVFSAGSAHSLEGVLAIFKDFAAFSGLNISLEKSTLFMASISSETCASILARFPFDSGSLPVRYLGLPLMTKRMTLADCLPLLEKIRSRISSWKNRFLSYAGRLQLLNSVISSLTKFWISAFRLPRACIREIEQISAAFLWSGTDLNPHKAKVAWHDVCKPKSEGGLGLRSLVDANKICCFKLIWRLVSAKHSLWVNWIQNNLIRTVAEALSSHRRRSHRDDILNDIEEELEKLLCRGICTEQDRSLCRSIGGQFKAKFFSPEIWHQIREQGLVKQWHKAIWFSGATPKFTFISWLAAHDRLTTGDKMASWNRGISSVCVLCNISAESRDHLFFSCNFSSHIWDRLTRRLLLCRYTTNFPALLLLLSGQDFSGTKRFLLRYVFQATIHTLWRERNKRRHGDLPIPSDHIIKFIDRQTRNRLSTITKQGLHKYADGLRIWFAARDNLTPNH

SEQ ID NO: 78 - protein, 1255 aa, Aspergillus oryzae
MNKTLRVIQLNVRKQGAVHESLMNDEETQNTVALAIQEPQARRIQGRLLTTPMGHHKWTKMVPSTWREGRWAVRSMLWINKEVEAEQVPIESPDLTAAVIRLPERLIFMASVYVEGGNASALDDACNHLLDAITKVRRDTGVVVEILIMGDFNRHDQLWGGDDVSLGRQGEADPIIDLMNECALSSLLRRGTKTWHGGGHSGDCESTIDLVLASENLADSVIKCAILGTEHGSDHCAIETVFDAPWSLPKHQGRLLLKNAPWKEINTRIANTLAATPSEGTVQQKTDRLMSAVSEAVHALTPKSKPSSHAKRWWTADLTQLRQIHTYWRNHARSERRAGRKVPYLETMAQGAAKQYHDAIRQQKKKHWNQFLADNDNIWKAERYLKSGEDAAFGKIPQLLRADGTTTTDHKEQAEELLAKFFPPLPDNIDDEGTRPQRAPVEMPAITMEEIERQLMAAKSWKAPGEDGMPAIVWKMTWPTVKYRVLDLFQASLEGGTLPRQWRHAKIIPLKKPNKENYTIAKSWRPISLLATLGKVLESVVAERISHAVETHGLLPTSHFGARKQRSAEQALVLLQEQIYAAWRGRRVLSLISFDVKGAYNGVCKERLLQRMKARGIPEDLLRWVEAFCSERTATIQINGQLSEVHSLPQAGLPQGSPLSPILFLFFNADLVQRQIDSQGGAIAFVDDFTAWVTGPTAQSNREGIEGIIKEALHWERRSGATFEAEKTAIIHFTPKTSKLDREPFTIKGQAVEPKDHVKILGVLMDTSLKYKEHIARAASKGLEAVMELRRLRGLSPSTARQLFTSTVTPVVDYASNVWMHAFKNKATGPINRVQRVGAQAIVGTFLTVATSVAEAEAHIATAQHRFWRRAVKMWTDLHTLPDTNPLRRNTARIKKFRRFHRSPLYQVADALKNIEMETLETINPFTLAPWEARMQTDGEAMPDPQAIPGGSIQIAISSSARNGFVGFGVAIEKQPPQYRKLKLKTFSVTLGARSEQNPFSAELAAIAHTLNRLVGLKGFRFRLLTSNKATALTIQNPRQQSGQEFVCQMYKLINRLRRKGNHIKILWVPASEDNKLLGLAKEQARAATHEDAIPQAQVSRMKSTTLNLARSQAATTKALPEDVGRHIKRVDAALPGKHTRQLYDGLSWKEATVLAQLRTGMARLNGYLYRINVAQTDQCACGQARETVEHFLFRCRKWTTQRIALLQCTRTHRGNLSLCLGGKSPSNDQQWVPNLEAVRASIRFAMTTGRLDAV

SEQ ID NO: 79 - protein, 1087 aa, Danio rerio
MTHANGQTTNKIYVTCICGKLCKNHWGLKIHLARMKCLEQESKVQRTGPEPGETQEEPGPEATHRAKSLHVPEPQTPSEVVQQRIKWPPASKRSEWLQFDEDVSNIIQAIAKGDADSRLKTMTTIIFSYALERFGCIEKGKTKPTTPYTMNRRATQIHHLRQELRSLKKLYKKATDEEKQPLAELKNILRKKLMILRRAEWHRRRGRERARKRAAFITNPFGFTKQLLGDKRSGRLECLIEEVNRFIEETVSDPLREQELEPNKALISPTPPAREFSLRGPSLKEVKEIIKASRSASTPGPSGIPYLVYKRCPGLLLHLWKILKVIWQRGRVAEQWRCAEGVWIPKEENSKNINQFRIISLLSVEGKVFFSIVSRRLTEFLLENNYIDPSVQKGGIPGAPGCLEHTGVVTQLIREAHENRGDLVVLWLDLANAYGSIPHKLVELALHRHHVPSKIKDLILDYYNNFKMRVTSGSETSSWHRIGKGIITGCTISVILFALAMNMVVKSAEVECRGPLTKSGVRQPPIRAYMDDLTITTTTVPGSRWILQGLERLIAWARMSFKPSKSRSMVLKKGKVVDKFHFSISGSVNPTITEQPVKSLGKLFDSSLKDSAAIQKSKKELGAWLAMVDKSGLPGRFKAWIYQHSILPRVLWPLLIYAVPMSTVESLERKISGFLRKWLGLPRSLTSAALYGTSNTLQLPFSGLTEEFIVVRTREALQYRDSRDGKVSSACIEVRTGRKWNAGKAVEVAESRLQQKALVGTVATGRAGLGYFPKTLVSQVKGKERHHLLQGEVRASVEEERVSRVVGLRQQGAWTRWNTLQCRITWANILHADFQRVRFLVQAVYDVLPSPSNLHIWGKNETPSCLLCSGRGSLEHLLSSCPKALADGRYRWRHDQVLKAIAASLASAINTSKNHRAPRKAVHFIKAGEKPRALPQLTTGLLHKASDWQLEVDLGKQLRFPHHIAATRLRPDIIAISEASRQLIILELTVPWEERIEEANERKRAKYQELVEACRERGWRTYYEPIEIGCRGFAGRSLCKVLSRLGITGVAKKRAIRSASEAAEKATRWLWIKRADPWTAVGTQVGT

SEQ ID NO: 80 - protein, 769 aa, Coprinopsis cinerea
MERSVEEKRKNWRMVDWKEYREKLEANLRKEMGVGEIEDEDELEVEVDALIRAIGMTTEQVVKILERVDWSRGWWNDECRRKKKEFNEARREAWKYRAMPEHPALEEERRIGREYRTLIERTRTECWNEWVREVTELQTWTLNKFIGNTPGDGGLDRMPTLRWTDENGVEVIATDGRSKAKGLVRQLFPERPAESGVPEGYEYPEPVEYEARMTEERIKGAIKSLKAYKAPGPDGIPNVVWKECVELLAPQLERIFKAVYEKGMYSERWKEWTTVVLKKPGKPRYDTPKAWRPIALMNTMGKILTALLTEDLKYVTEKYSLLPNTHFGGRPGRTTTDAIQLLTSWIKGHWRKGNVVSVLFLDIEGAFPNVVVSRLAHNMRRRRVPEFIVKLIEHQLRDRRTKLKFDDYESEWVPIDNGSGQGDPKSMLEYLFYNADLIDLVAGLGEELEEGENGEDAPRGSARERGTEKRDENAAAFVDDAWLGGAGATFEEANETLKDMMNRRGGAMEWSKKHNSKFEISKLVYMGFTRRMRRTREGEGGKMTAEERPELEMEGAGNDGGGEGDKVEHGVQENGESEERSGTEGAEDVVQRGDDTKGNIRIGNMVHTSEGDRGEEEEGGISFGDSKTHESTQNLPASNNWSAKDNGHGRLGDPRGDTTINGNAQLDMSKGLDTVVNCCFLAYKSLIALASLVALSSLALPLWFQDTTSDDPESTPTTQGSAISGKETTEETPVADTQAGRSIPRNTDDETGNHRTGCESTKRATTIRN

SEQ ID NO: 81 - protein, 478 aa, synthetic construct
  REGION 1..478: note = Description of Artificial Sequence: Synthetic polypeptide
QKEPTQDVTLPQTWLTDFPQAWAETAGMGLAVQQAPLVIELKATATPVSIKQYPMSREARRGIKPHIQRLLDQGILVPCQSPWNTPLLPVKKPGTNDYRPVQDLREVNKRVEDIHPTVPNPYNLLSGLPPERQWYTVLDLKDAFFCLRLHPTSQPLFAFEWRDPETGMSGQLTWTRLPQGFKNSPTIFDEALHRDLADFRIQHPDVTLLQYVDDLLLAADTEQDCLKGTQALLQTLGELGYRASAKKAQICQREVTYLGYKLKGGQRWLTEARKETVLQIPTPKTARQVREFLGTAGFCRLWIPGFAELAAPLYPLTKEGSAFNWGEKEEKAFQELKQALLTAPALGLPDLTKPFQLFVDEKQGIAKGVLTQKLGPWRRPVAYLSKKLDPVAAGWPPCLRMVAATALLTKDAGKLTMGQEIVILTPHAVEAVLKQPPDRWLSNARMIHYQALLLDTPRVQFHPTVALNPATTEPLPES

SEQ ID NO: 82 - protein, 478 aa, synthetic construct
  REGION 1..478: note = Description of Artificial Sequence: Synthetic polypeptide
SKEPKQDVTLPQTWLSDFPQAWAETAGMGLAVQQPPIVIQLKATATPVRIKQYPMSREARRGIKPHIQRLLDLGILVPCQSPWNTPLLPVKKPGTNDYRPVQDLREVNKRVEDIHPTVPNPYNLLSSLPPERQWYTVLDLKDAFFCLPLHPESQPLFAFEWRDPETGRSGQLTWTRLPQGFKNSPTIFDEALHRDLADFRIQHPDLTLLQYVDDLLLAADTEQDCLKGTQALLQTLGELGYRASAKKAQLCQREVTYLGYKLKGGQRWLTEARKETVLQIPTPKTPRQVREFLGTAGFCRLWIPGFAELAAPLYPLTKEGNAFNWGEKEEKAFQELKQALLQAPALGLPDLTKPFQLFVDEKQGIAKGVLTQKLGPWKRPVAYLSKKLDPVAAGWPPCLRMIAATALLTKDAGKLTLGQEIVILTPHAVEAVLKQPPDRWLSNARMIHYQALLLDTPRVQFDPSVALNPATTETLPES

SEQ ID NO: 83 - protein, 446 aa, synthetic construct
  REGION 1..446: note = Description of Artificial Sequence: Synthetic polypeptide
LTQGDIQEINPEVWATEGKYGCLDIPPIKIEMQKDTPAIRVKQYPMSPEGKKGLASVIEHLLKENILEPCMSPHNTPILAIKKDEGKFRLVQDLREINKRTIARHPVVPNPYTLLSKIPREHTWFTVIDLKDAFWACPLAEECRDWFAFEWEHPDRGRKQQLRWTRLPQGYTESPNIFGQALETLLEQFSPKEGVQILQYVDDLLISGETEKEVKDVSIQLLNFFGEKGLKVSQSKLQFVETEVTYLGHIIGKGSKRLSPARISGIVSISPPKTKRDIRKLLGLFGYCKHWIDKYTQGVKFLYDKLIDQEPMNWTESDEKQLQDLKEKLSSAPVLSLPDLKKEFDLFVNTEEGIAYGVLTQEWGGYRKPVAFLSKLLDPVARGWPACLQAVAAAAILIEEAQKLTLQGKIPHDLKTILSQRAQDNLELTTSPHQRDRTLTFKRNKR

SEQ ID NO: 84 - protein, 468 aa, synthetic construct
  REGION 1..468: note = Description of Artificial Sequence: Synthetic polypeptide
LTQEDIEEINPEVWAEEGKSGLLDIPPIKIEMQKETPPIRVKQYPISPEGRKGLAPIIEQLLKEGILEPCMSPHNTPILAVKKAEGKYRLVQDLREINKRTVTRHPVVPNPYTLLSQIPREHAWFTIIDLKDAFWACPLAEECRDWFAFEWEHPETKRKQQLRWTRLPQGFTESPNLFGQALEKLLEQFSPEEGVQILQYVDDLLISGEDQSEVRETSIQLLNFLGEKGLKVSKSKLQFVESEVTYLGHLIGKGYKRLSPERIAGILSIPPPKTKRDIRKLLGLFGYCRLWLDKYTQSVKFLYDKLVDSEPIEWTEEDEKQLKDLKEKLSSAPVLSLPDLKKEFDLFVNTEEGVAYGVLTQEWGGCKKPVAFLSKLLDPVARGWPTCLQAVAAAAILIEETQKLTLQGKIRVHTPHDLKTILSQKAQKWLTDSRILRYEIALMNTDNLEFTTSPIQRDRTLTFKRNKK

SEQ ID NO: 85 - protein, 644 aa, synthetic construct
  REGION 1..644: note = Description of Artificial Sequence: Synthetic polypeptide
LTLEDEEKINPEVWYTPDSVGRLDIEPITVTIKDPDTPIRIKQYPISLEGRRGLKPVIERLLSKGLLEPCMSPHNTPILPVKKPDGSYRLVQDLREINKRTVTRFPVVANPYTLLSKLSPENQWYSVIDLKDAFWACPLDEESRDYFAFEWEDPETHRKQQLRWTVLPQGFTESPNLFGQALEQLLQEYQTGEGVTLIQYVDDLLIAGETEEEVRKESIKLLNFLGLKGLKVSKAKLQFVEEEVKYLGHWLSKGEKKLDPERVKGILSLPPPKSKRQIRQLLGLLGYCRQWIENYSSKVKFLYEKLSQGGLVKWTEEDEKQLKRLRQDLIQAPVLSLPDLKRPFYLFVNTDNGTAYGVLTQEWAGKKKPVGYLSKLLDPVSKGWPTCLQAVVACALLTEEAHKITFNSELKVLSPHNIRGILQQKADKWITDSRLLKYEGILLDSPKLTLEVTGLQNPAQFLYDEKPVAHNCMATIEEQTKIRPDLEEEELETGERLFVDGSSRVIEGKRVSGYAIIGGPEVIESGPLNKTWSAQACELYAVLRALERLKDKEGTIYTDSKYAFGVVHTFGKIWENAADQEAKKAALTESEQKLKALFLPKRLSIIHCPGHQKGHSAEARGNRMADQAARKAAITETPDTSTLL

SEQ ID NO: 86 - protein, 644 aa, synthetic construct
  REGION 1..644: note = Description of Artificial Sequence: Synthetic polypeptide
LTQEDEEKINPEVWHTEDEAGRLDIEPISIEIERPEDPIRIKQYPISLEGRRGLKPIIERLLKKGILEPCMSPHNTPILPVKKPDGSYRLVQDLREINKRTVTRFPVVANPYTLLSRVSPENQWYSVIDLKDAFWACPLAEESRDYFAFEWEDPETNRKQQLRWTRLPQGFTESPNLFGQALEQLLQQFSPGEGVTILQYVDDLLIAGETEEEVREATIKLLNFLGEKGLKVSKSKLQFVEPEVKYLGHWISKGKKRLDPERVAGILSLPPPKSKRQIRQLLGLLGYCRQWIENYSQKVKFLYEKLTEGGKIKWTEEDEKQLKRLKQALITAPVLSLPDLKKPFHLFVNTDNGTAYGVLTQEWAGVKKPVGYLSKLLDPVSRGWPTCLQAIVAVALLIEEAQKITFGGELIVYTPHNVRTILQQKAEKWLTDSRLLKYEAILLNAPKLELRVTKLQNPAEFLYLEKPVSHNCTDTIEEQTKVRPDLEDEELEEGEKWFVDGSSRVIEGKRKSGYAIINGKEVIESGPLNASWSAQACELFAVLRALERLKGKVGTIYTDSKYAFGVVHTFGKIWENLADQEAKKAALTESRQKLKALFLPKRLSIIHCPGHQKGHSAEARGNRMADQAARKAAITETPDTSTLL

SEQ ID NO: 87 - protein, 646 aa, synthetic construct
  REGION 1..646: note = Description of Artificial Sequence: Synthetic polypeptide
LTLEDEEKINPEVWHTEDEAGRLDIEPITIEIERPEDPIRIKQYPISPEGRRGLKPIIERLLKKGILEPCMSPHNTPILPVKKPDGSYRLVQDLREINKRTVTRYPVVPNPYTLLSKVSPEHQWFSVIDLKDAFWACPLAEESRDIFAFEWEDPETGRKQQLRWTRLPQGFTESPNLFGQALEKLLQQFSPPEGVTILQYVDDLLIAGETEEEVREATIKLLNFLGEKGLKVSKSKLQFVEPEVKYLGHLISKGQRKLSPERVAGILSLPPPKSKREIRKLLGLLGYCRLWIEGYTETVKFLYEKLTEGGKIKWTEEDEKQLQELKQALTTAPVLSLPDLKKPFHLFVNTEEGIAYGVLTQEWGGCKKPVAYLSKLLDPVSRGWPTCLQAVAAVAILIEEARKLTFGGKLVVYTPHAVRAILQQKAEKWLTDSRLLKYEAILLDKPRLELHVTKLVQNPAEFLYLEPKPVHHDCTETLEENTKRRPDLEDEELEEGEKWFVDGSSRVIEGKRKSGYAIINGKEVIESGPLNASWSAQACELFAVLRALERLKGKVGTIYTDSKYAFGVVHTFGKIWENLADQEAKKAALTESRQKLKALFLPKRLSIIHCPGHQKGHSAEARGNRMADQAARKAAITETPDTSTLL

SEQ ID NO: 88 - protein, 480 aa, synthetic construct
  REGION 1..480: note = Description of Artificial Sequence: Synthetic polypeptide
LTQEDEEKINPEVWHTEEEAGRLDIEPISIEIERPEDPIRIKQYPISLEGRRGLKPIIEQLLKKGILEPCMSPHNTPILPVKKPDGSYRLVQDLREINKRTVTRYPVVPNPYTLLSKVPPEHQWFSVIDLKDAFWACPLAEESRDIFAFEWEDPETRRKQQLRWTRLPQGFTESPNLFGQALEKLLQQFSPPEGVQILQYVDDLLISGEDEEEVREATIKLLNFLGEKGLRVSKSKLQFVEPEVKYLGHLISKGSKRLSPERIAGILSLPPPKSKREIRKLLGLLGYCRLWIEKYTQTVKFLYEKLTEGDKIKWTEEDEKQLKKLKQKLTSAPVLSLPDLKKPFHLFVNTEKGVAYGVLTQEWGGVKKPVAYLSKLLDPVSRGWPTCLQAIAATAILIEEAQKLTFGGKLIVYTPHNVRTILNQKAEKWLTDSRLLKYEAALMNKPRLELHVTKIVEDPAEFTYTPVQHDCTLTLKRQKK

SEQ ID NO: 89 - protein, 465 aa, synthetic construct
  REGION 1..465: note = Description of Artificial Sequence: Synthetic polypeptide
LTLEDEEKINPKVWHTGREAGRLDIEPISIEIERPEDPIRIKQYPISLEGRRGLKPIIEDLIKKGILEPCMSRHNTPILAIKKTDGSYRLVQDLRAINERTKTRFPVVANPYTLLNRVSPEDTWYSVIDLKDAFWTCPLAEGSRDYFAFQWEDPDTNRKQQLRWASLPQGFVDSPNLFGQALEQLLSQFSPGEGTKILQYVDDLLVAGETEEDVRECTIELLNFLGEKGLKVSKSKLQFTEPEVKYLGHWITKGKKKLDPERVAGILELPPPKNKRQVRQLLGLLGYCRQWIEGYSEKVKFLYEKLTTDKIKWTEQDEKELQRLKEALITAPVLSLPDVKKKFQLFVDVSNHTAHGVLTQEWAGDKKPVGYLSKLLDPVSRGWPTCLQAIVAVALLIEEAKKITFGGDLVVYTPHNVRLILQQKAERWLTDARLLKYEAILIHAPELELRVTKASNPAEFLYLGK

SEQ ID NO: 90 - protein, 647 aa, synthetic construct
  REGION 1..647: note = Description of Artificial Sequence: Synthetic polypeptide
LPTQVEDAVVPWVWSTEGPGKSIAVEPVVIELKEGEQPVRIKQYPMKPEARRGIKPIIEQFLKLGILEECQSEYNTPILPVKKPNGEYRLVQDLRAVNKITEDIYPVVANPYTLLTSLSPEHQWFTVIDLKDAFFCIPLEPESQKIFAFEWENPETGRKTQLTWTRLPQGFKNSPTIFGEQLAKDLEEWKAPPESGVLLQYVDDLLIATETKEACIKATIALLNFLGQKGYRVSKKKAQLVQQEVIYLGYEISGGQRKLGPDRKEAICQIPKPKTVKELRSFLGMVGWCRLWIPNYGLLAKPLYELLKEGSDKLNWTKEAEKAFQELKQALTTAPALGLPDLSKPFQLFVNEKQGIALGVLTQKLGPWRRPVAYLSKQLDTVAAGWPSCLRAVAAVAILIQEARKLTMGQKMVVYVPHAVSAVLEQKAGHWLSSSRMLKYQAILLEQDDVELAVTNVLNPATFLYSEPEPVHHDCLETIEASYSSRPDLKDTPLEDAEEWFTDGSSYVISGKRKSGYAVTTCKEVIESGPLNPSYSAQKAEIIALTRALELAKGRTVNIYTDSRYAFGVVHAHGAIWKELADREAKKAAKTELQQSLKALFLPKRLSIIHCPGHQKGHSAEARGNRMADQAARKAAITETPDTSTLL

SEQ ID NO: 91 - protein, 647 aa, synthetic construct
  REGION 1..647: note = Description of Artificial Sequence: Synthetic polypeptide
LPKQVEDAVVPWVWSTEGPGKAVAVEPVVIELKPGEQPVRIKQYPMKREARKGIKPIIERFLKLGILEECQSPYNTPILPVKKPNGEYRLVQDLRAVNKITVTIYPVVPNPYTLLSSLSPEHQWFTVIDLKDAFFCIPLEPESQKIFAFEWEDPETGRKTQLTWTRLPQGFKNSPTIFGEALAKDLQEWKAPPESGTLLQYVDDLLIATETKETCIKATIALLNFLGEKGYRVSKKKAQLVQQEVTYLGYEISKGQRRLSPDRKEAICQIPKPKTVRELRSFLGMVGWCRLWIPNYGLLAKPLYELLKEGSDPLNWTEEEEKAFQQLKQALTTAPALGLPDLSKPFQLFVNEKQGIALGVLTQKLGPWKRPVAYLSKQLDPVAAGWPSCLRAVAATAILIQEARKLTLGQKMVVYVPHTVSAVLEQKAGHWLSSSRLLKYQAILLDQPDVELKVTKVINPATFLYSEPEPVHHDCLETIEASYSSRPDLKDTPLEDAEEWFTDGSSYVINGKRKSGYAIITCKEVIESGPLNPSYSAQKAELIALTRALELAKGRTGNIYTDSKYAFGVVHAHGAIWKELADREAKKAAKTDLQQPLKALFLPKRLSIIHCPGHQKGHSAEARGNRMADQAARKAAITETPDTSTLL

SEQ ID NO: 92 - protein, 666 aa, synthetic construct
  REGION 1..666: note = Description of Artificial Sequence: Synthetic polypeptide
LPTQVVTAVVPQVWLSPHLDLFYRTDFPKAWAETEGPGKAIQVEPVVIELKPGEQPVRIKQYPMSPEARRGIKPIIERLLKLGILEPCQSPYNTPILPVKKPDNGEYRLVQDLRAVNKRTVTIYPVVPNPYTLLSSLSPEHQWFTVIDLKDAFFCIPLAPESQPIFAFEWEDPETGRKTQLTWTRLPQGFKNSPTIFGEALAKDLQEFPAPPEGVTLLQYVDDLLIAAETEEACLKATIALLNFLGQKGYRVSKKKAQLCQQEVTYLGYEISGGQRKLSPDRKEAILQIPKPKTVKELRSFLGMVGYCRLWIPGYAELAKPLYELLKEGSDKLNWTEEAEKAFQELKQALTTAPALGLPDLSKPFQLFVNEKQGIALGVLTQKLGPWRRPVAYLSKKLDPVAAGWPSCLRAVAAVAILIQEARKLTMGQKMVVYTPHAVSAVLEQKADRWLSNSRMLKYQAILLDKPRVELHVTKVLNPATFLYSEPEPVHHDCLETLEESYSRRPDLKDTPLEDAEEWFTDGSSYVISGKRKSGYAIITCKEVIESGPLNPSYSAQKAELIALTRALELAKGRTVNIYTDSKYAFGVVHAHGAIWKELADREAKKAAKTELQQSLKALFLPKRLSIIHCPGHQKGHSAEARGNRMADQAARKAAITETPDTSTLL

SEQ ID NO: 93 - protein, 651 aa, synthetic construct
  REGION 1..651: note = Description of Artificial Sequence: Synthetic polypeptide
LTGQVVTAVVPQLWLTEDEGGLIQVEPVTIELKPGEQPVRIKQYPLSPEARRGIKPIIERLLKKGILEPCQSPYNTPILPVKKPDNGTYRLVQDLRAINKRTVTIYPVVPNPYTLLSSLSPEHQWFTVIDLKDAFFSVPLAPESQPIFAFEWEDPETGRKQQLTWTRLPQGFKNSPTIFGQALEKTLQEFPAPPEGVTLLQYVDDLLIAAETEEECLKATIALLNFLGQKGFKVSKKKLQLCQPEVTYLGHEISGGQRKLSPDRVAAILQLPKPKTVKELRSFLGLVGYCRLWIPGYTELAKPLYELLKEGSPPKDKLNWTEEAEKQFQELKQALTTAPALGLPDLKKPFHLFVNEKEGIALGVLTQKLGGHRRPVAYLSKKLDPVAAGWPSCLRAVAAVAILIQEARKLTMGQKMVVYTPHAVSAVLEQKADRWLSNSRMLKYQAILLDKPRVELHVTKVQNPATFLYSEPEPVHHDCLETLEESYSRRPDLKDTPLEDAEEWFTDGSSYVISGKRKSGYAIITCKEVIESGPLNPSYSAQKAELIALTRALELAKGRTVNIYTDSKYAFGVVHAHGAIWKELADREAKKAAKTELQQSLKALFLPKRLSIIHCPGHQKGHSAEARGNRMADQAARKAAITETPDTSTLL

SEQ ID NO: 94 - protein, 632 aa, synthetic construct
  REGION 1..632: note = Description of Artificial Sequence: Synthetic polypeptide
IPEEVEQAVVPWVWETDTPGKSKAAQPVVVELKEGKEPVRIKQYPIKPEARQGIKPIIDKFLKLGILEECESEYNTPIFPVKKPNGEYRLVQDLRAINEITKDIYPVVANPYTLLTSVSEKHEWFTVIDLKDAFFCIPLEKESRKLFAFEWENPDTGRKTQLTWTRLPQGFKNSPTIFGNQLAKELEEWKTTQVKVPPESYVLLQYVDDILIATEEKETCIKLTISLLNFLGQGGYRVSKKKAQLVRQEVIYLGCEISQGQRKLGTNRIEAICAIPEPRNHQELRSFLGMVGWCRLWILNYGLIAKPLYEALKEPRLTWGKQQEKAFLELKQALTEAPALGLPDLSKDFQLFVNERQRLALGVLTQRLGPWKRPVGYFSKQLDTVSAGWPSCLRAVAATVILIQEARKLTLGRKIEVYVPHMVTAVLEQKGGHWLSSSRMLKYQAILMEQDDVELKITNLINPAEFLSEEGPLAHDCVEIIEQTYASREDLKDVLLEQAEEWFTDGSSFGKNATGWAVSNNPQYSAQKAEIIAYIRAKGRTGNFYTDSRYAFGVVHAHGAIWKELADREAKKAAKTELQQSLKALFLPKRLSIIHCPGHQKGHSAEARGNRMADQAARKAAITETPDTSTLL

SEQ ID NO: 95 - protein, 447 aa, synthetic construct
  REGION 1..447: note = Description of Artificial Sequence: Synthetic polypeptide
LTGQVVTAVVPQLWLSLPPDPHLDLFYRTDFPKAAAIDDSLWSESEDEGGLIQVEPVKIKLKPGERPVRIKQYPLSPEAEQGIKPIIERLLKKGILEPTQSPYNTPILPVKKPDNGTYRLVQDLRAINKLTVTITPVVPNPYTLLSSLSPKHQWFTVIDLADAFFSVPLDPESQPIFAFTFENQQYTWTRLPQGFKNSPTIFSQALKKTLQEFPALPEGVTLLQYVDDLLIAAETEEECLKATIALLNFLAQKGFKVSKKKLQLCQPEVTYLGHEISGGQRKLSPDRVAAILQLPKPKTVKELQSFLGLVGYCRTWIPDYTELAKPLRELLRHEGSPPKDKLNWTEEAEKQFQELKKALTTAPALGLPDYKKPFHLHVNEKEGIALGVLLQKHGGHRRPVAYLSKKLDPVAAGWPSCLRAVAAVAIAIQEARHLVMGHKMVVYTPHA

SEQ ID NO: 96 - protein, 69 aa, synthetic construct
  REGION 1..69: note = Description of Artificial Sequence: Synthetic polypeptide
MSPSVQEVEKLHVLDRNGDGKVSAEELKAFADDSKCPLDSNKIKAFIKEHDKNKDGKLDLKELVSILSS

SEQ ID NO: 97 - protein, 387 aa, synthetic construct
  REGION 1..387: note = Description of Artificial Sequence: Synthetic polypeptide
MKIEEGKLVIWINGDKGYNGLAEVGKKFEKDTGIKVTVEHPDKLEEKFPQVAATGDGPDIIFWAHDRFGGYAQSGLLAEITPDKAFQDKLYPFTWDAVRYNGKLIAYPIAVEALSLIYNKDLLPNPPKTWEEIPALDKELKAKGKSALMFNLQEPYFTWPLIAADGGYAFKYENGKYDIKDVGVDNAGAKAGLTFLVDLIKNKHMNADTDYSIAEAAFNKGETAMTINGPWAWSNIDTSKVNYGVTVLPTFKGQPSKPFVGVLSAGINAASPNKELAKEFLENYLLTDEGLEAVNKDKPLGAVALKSYEEELAKDPRIAATMENAQKGEIMPNIPQMSAFWYAVRTAVINAASGRQTVDEALKDAQTNSSSNNNNNNNNNNLGIEGR

SEQ ID NO: 98 - protein, 495 aa, synthetic construct [sequence omitted]

SEQ ID NO: 99 - protein, 116 aa, synthetic construct
  REGION 1..116: note = Description of Artificial Sequence: Synthetic polypeptide
MSDKIIHLTDDSFDTDVLKADGAILVDFWAEWCGPCKMIAPILDEIADEYQGKLTVAKLNIDQNPGTAPKYGIRGIPTLLLFKNGEVAATKVGALSKGQLKEFLDANLAGSGSGHM

SEQ ID NO: 100 - protein, 109 aa, synthetic construct
  REGION 1..109: note = Description of Artificial Sequence: Synthetic polypeptide
MGLEVLFQGPGSMSDQEAKPSTEDLGDKKEGEYIKLKVIGQDSSEIHFKVKMTTHLKKLKESYCQRQGVPMNSLRFLFEGQRIADNHTPKELGMEEEDVIEVYQEQTGG

SEQ ID NO: 101 - protein, 220 aa, synthetic construct
  REGION 1..220: note = Description of Artificial Sequence: Synthetic polypeptide
MSPILGYWKIKGLVQPTRLLLEYLEEKYEEHLYERDEGDKWRNKKFELGLEFPNLPYYIDGDVKLTQSMAIIRYIADKHNMLGGCPKERAEISMLEGAVLDIRYGVSRIAYSKDFETLKVDFLSKLPEMLKMFEDRLCHKTYLNGDHVTHPDFMLYDALDVVLYMDPMCLDAFPKLVCFKKRIEAIPQIDKYLKSSKYIAWPLQGWQATFGGGDHPPKSD

SEQ ID NO: 102 - protein, 56 aa, synthetic construct [sequence omitted]

SEQ ID NO: 103 - protein, 138 aa, synthetic construct
  REGION 1..138: note = Description of Artificial Sequence: Synthetic polypeptide
MCMAGLAQHDEAVDNKFNKEQQNAFYEILHLPNLNEEQRNAFIQSLKDDPSQSANLLAEAKKLNDAQAPKVDNKFNKEQQNAFYEILHLPNLNEEQRNAFIQSLKDDPSQSANLLAEAKKLNDAQAPKVDANSAGKST

SEQ ID NO: 104 - protein, 297 aa, synthetic construct
  REGION 1..297: note = Description of Artificial Sequence: Synthetic polypeptide
MAEIGTGFPFDPHYVEVLGERMHYVDVGPRDGTPVLFLHGNPTSSYVWRNIIPHVAPTHRCIAPDLIGMGKSDKPDLGYFFDDHVRFMDAFIEALGLEEVVLVIHDWGSALGFHWAKRNPERVKGIAFMEFIRPIPTWDEWPEFARETFQAFRTTDVGRKLIIDQNVFIEGTLPMGVVRPLTEVEMDHYREPFLNPVDREPLWRFPNELPIAGEPANIVALVEEYMDWLHQSPVPKLLFWGTPGVLIPPAEAARLAKSLPNCKAVDIGPGLNLLQEDNPDLIGSEIARWLSTLEISG

SEQ ID NO: 105 - protein, 206 aa, synthetic construct
  REGION 1..206: note = Description of Artificial Sequence: Synthetic polypeptide
MKKWTNRLMTIAGVVLILVAAYLFAKPHIDNYLHDKDKDEKIEQYDKNVKEQASKDKKQQAKPQIPKDKSKVAGYIEIPDADIKEPVYPGPATPEQLNRGVSFAEENESLDDQNISIAGHTFIDRPNYQFTNLKAAKKGSMVYFKVGNETRKYKMTSIRDVKPTDVGVLDEQKGKDKQLTLITCDDYNEKTGVWEKRKIFVATEVK

SEQ ID NO: 106 - protein, 161 aa, synthetic construct
  REGION 1..161: note = Description of Artificial Sequence: Synthetic polypeptide
MKKWLLAAGLGLALATSAQAADKIAIVNMGSLFQQVAQKTGVSNTLENEFKGRASELQRMETDLQAKMKKLQSMKAGSDRTKLEKDVMAQRQTFAQKAQAFEQDRARRSNEERGKLVTRIQTAVKSVANSQDIDLVVDANAVAYNSSDVKDITADVLKQVK

SEQ ID NO: 107 - protein, 242 aa, synthetic construct
  REGION 1..242: note = Description of Artificial Sequence: Synthetic polypeptide
MNITDIMNAIDAIKALPICELDKRQGMLIDLLVEMVNSETCDGELTELNQALEHQDWWTTLKCLTADAGFKMLGNGHFSAAYSHPLLPNRVIKVGFKKEDSGAAYTAFCRMYQGRPGIPNVYDVQRHAGCYTVVLDALKDCERFNNDAHYKYAEIASDIIDCNSDEHDELTGWDGEFVETCKLIRKFFEGIASFDMHSGNIMFSNGDVPYITDPVSFSQKKDGGAFSIDPEELIKEVEEVAR

SEQ ID NO: 108 - protein, 194 aa, synthetic construct
  REGION 1..194: note = Description of Artificial Sequence: Synthetic polypeptide
MGSDTSNATSVVNVSASSSTSTIYDLGNMSKDEVVKLFEELGVFQAAILMFSYMYQAQSNLSIAKFADMNEASKASTTAQKMANLVDAKIADVQSSTDKNAKAKLPQDVIDYINDPRNDISVTGIRDLSGDLSAGDLQTVKAAISAKANNLTTVVNNSQLEIQQMSNTLNLLTSARSDVQSLQYRTISAISLGK

SEQ ID NO: 109 - protein, 117 aa, synthetic construct
  REGION 1..117: note = Description of Artificial Sequence: Synthetic polypeptide
MAMSNMTYNNVFDHAYEMLKENIRYDDIRDTDDLHDAIHMAADNAVPHYYADIRSVMASEGIDLEFEDSGLMPDTKDDIRILQARIYEQLTIDLWEDAEDLLNEYLEEVEEYEEDEE

SEQ ID NO: 110 - protein, 169 aa, synthetic construct
  REGION 1..169: note = Description of Artificial Sequence: Synthetic polypeptide
MKKESKKMKTILPAVLFAAFATTSAWAAESVQPLEKIAPYPQAEKGMKRQVIQLTPQEDESTLKVELLIGQTLEVDCNLHRLGGKLENKTLEGWGYDYYVFDKVSSPVSTMMACPDGKKEKKFVTAYLGDAGMLRYNSKLPIVVYTPDNVDVKYRVWKAEEKIDNAVVR

SEQ ID NO: 111 - protein, 134 aa, synthetic construct
  REGION 1..134: note = Description of Artificial Sequence: Synthetic polypeptide
MAEALFKEIDVNGDGAVSYEEVKAFVSKKRAIKNEQLLQLIFKSIDADGNGEIDQNEFAKFYGSIQGQDLSDDKIGLKVLYKLMDVDGDGKLTKEEVTSFFKKHGIEKVAEQVMKADANGDGYITLEEFLEFSL

SEQ ID NO: 112 - protein, 131 aa, synthetic construct
  REGION 1..131: note = Description of Artificial Sequence: Synthetic polypeptide
MDKKTIYFICTGNSCRSQMAEGWGKEILGEGWNVYSAGIETHGVNPKAIEAMKEVDIDISNHTSDLIDNDILKQSDLVVTLCSDADNNCPILPPNVKKEHWGFDDPAGKEWSEFQRVRDEIKLAIEKFKLR

SEQ ID NO: 113 - protein, 164 aa, synthetic construct
  REGION 1..164: note = Description of Artificial Sequence: Synthetic polypeptide
MTDVTIKTLAAERQTSVERLVQQFADAGIRKSADDSVSAQEKQTLIDHLNQKNSGPDKLTLQRKTRSTLNIPGTGGKSKSVQIEVRKKRTFVKRDPQEAERLAAEEQAQREAEEQARREAEESAKREAQQKAEREAAEQAKREAAEQAKREAAEKDKVSNQQDD

SEQ ID NO: 114 - protein, 329 aa, synthetic construct [sequence omitted]

SEQ ID NO: 115 - protein, 196 aa, synthetic construct
  REGION 1..196: note = Description of Artificial Sequence: Synthetic polypeptide
MKVAKDLVVSLAYQVRTEDGVLVDESPVSAPLDYLHGHGSLISGLETALEGHEVGDKFDVAVGANDAYGQYDENLVQRVPKDVFMGVDELQVGMRFLAETDQGPVPVEITAVEDDHVVVDGNHMLAGQNLKFNVEVVAIREATEEELAHGHVHGAHDHHHDHDHDGCCGGHGHDHGHEHGGEGCCGGKGNGGCGCH

SEQ ID NO: 116 - protein, 283 aa, synthetic construct
  REGION 1..283: note = Description of Artificial Sequence: Synthetic polypeptide
MAEITASLVKELRERTGAGMMDCKKALTEANGDIELAIENMRKSGAIKAAKKAGNVAADGVIKTKIDGNYGIILEVNCQTDFVAKDAGFQAFADKVLDAAVAGKITDVEVLKAQFEEERVALVAKIGENINIRRVAALEGDVLGSYQHGARIGVLVAAKGADEELVKHIAMHVAASKPEFIKPEDVSAEVVEKEYQVQLDIAMQSGKPKEIAEKMVEGRMKKFTGEVSLTGQPFVMEPSKTVGQLLKEHNAEVTGFIRFEVGEGIEKVETDFAAEVAAMSKQS

SEQ ID NO: 117 - protein, 330 aa, synthetic construct
  REGION 1..330: note = Description of Artificial Sequence: Synthetic polypeptide
MSQNTLKVHDLNEDAEFDENGVEVFDEKALVEQEPSDNDLAEEELLSQGATQRVLDATQLYLGEIGYSPLLTAEEEVYFARRALRGDVASRRRMIESNLRLVVKIARRYGNRGLALLDLIEEGNLGLIRAVEKFDPERGFRFSTYATWWIRQTIERAIMNQTRTIRLPIHIVKELNVYLRTARELSHKLDHEPSAEEIAEQLDKPVDDVSRMLRLNERITSVDTPLGGDSEKALLDILADEKENGPEDTTQDDDMKQSIVKWLFELNAKQREVLARRFGLLGYEAATLEDVGREIGLTRERVRQIQVEGLRRLREILQTQGLNIEALFRE

SEQ ID NO: 118 - protein, 348 aa, synthetic construct
  REGION 1..348: note = Description of Artificial Sequence: Synthetic polypeptide
MKKWSRHLLAAGALALGMSAAHADDNNTLYFYNWTEYVPPGLLEQFTKETGIKVIYSTYESNETMYAKLKTYKDGAYDLVVPSTYYVDKMRKEGMIQKIDKSKLTNFSNLDPDMLNKPFDPNNDYSIPYIWGATAIGVNGDAVDPKSVTSWADLWKPEYKGSLLLTDDAREVFQMALRKLGYSGNTTDPKEIEAAYNELKKLMPNVAAFNSDNPANPYMEGEVNLGMIWNGSAFVARQAGTPIDVVWPKEGGIFWMDSLAIPANAKNKEGALKLINFLLRPDVAKQVAETIGYPTPNLAARKLLSPEVANDKTLYPDAETIKNGEWQNDVGAASSIYEEYYQKLKAGR

SEQ ID NO: 119 - protein, 169 aa, synthetic construct [sequence omitted]

SEQ ID NO: 120 - protein, 124 aa, synthetic construct
  REGION 1..124: note = Description of Artificial Sequence: Synthetic polypeptide
MTMYATLEEAIDAAREEFLADNPGIDAEDANVQQFNAQKYVLQDGDIMWQVEFFADEGEEGECLPMLSGEAAQSVFDGDYDEIEIRQEWQEENTLHEWDEGEFQLEPPLDTEEGRAAADEWDER

SEQ ID NO: 121 - protein, 138 aa, synthetic construct
  REGION 1..138: note = Description of Artificial Sequence: Synthetic polypeptide
MANPEQLEEQREETRLIIEELLEDGSDPDALYTIEHHLSADDLETLEKAAVEAFKLGYEVTDPEELEVEDGDIVICCDILSECALNADLIDAQVEQLMTLAEKFDVEYDGWGTYFEDPNGEDGDDEDFVDEDDDGVRH

SEQ ID NO: 122 - protein, 613 aa, synthetic construct
  REGION 1..613: note = Description of Artificial Sequence: Synthetic polypeptide
MEQNPQSQLKLLVTRGKEQGYLTYAEVNDHLPEDIVDSDQIEDIIQMINDMGIQVMEEAPDADDLMLAENTADEDAAEAAAQVLSSVESEIGRTTDPVRMYMREMGTVELLTREGEIDIAKRIEDGINQVQCSVAEYPEAITYLLEQYDRVEAEEARLSDLITGFVDPNAEEDLAPTATHVGSELSQEDLDDDEDEDEEDGDDDSADDDNSIDPELAREKFAELRAQYVVTRDTIKAKGRSHATAQEEILKLSEVFKQFRLVPKQFDYLVNSMRVMMDRVRTQERLIMKLCVEQCKMPKKNFITLFTGNETSDTWFNAAIAMNKPWSEKLHDVSEEVHRALQKLQQIEEETGLTIEQVKDINRRMSIGEAKARRAKKEMVEANLRLVISIAKKYTNRGLQFLDLIQEGNIGLMKAVDKFEYRRGYKFSTYATWWIRQAITRSIADQARTIRIPVHMIETINKLNRISRQMLQEMGREPTPEELAERMLMPEDKIRKVLKIAKEPISMETPIGDDEDSHLGDFIEDTTLELPLDSATTESLRAATHDVLAGLTAREAKVLRMRFGIDMNTDYTLEEVGKQFDVTRERIRQIEAKALRKLRHPSRSEVLRSFLDD

SEQ ID NO: 123 - protein, 238 aa, synthetic construct
  REGION 1..238: note = Description of Artificial Sequence: Synthetic polypeptide
MSKGEELFTGVVPILVELDGDVNGHKFSVSGEGEGDATYGKLTLKFICTTGKLPVPWPTLVTTFSYGVQCFSRYPDHMKQHDFFKSAMPEGYVQERTIFFKDDGNYKTRAEVKFEGDTLVNRIELKGIDFKEDGNILGHKLEYNYNSHNVYIMADKQKNGIKVNFKIRHNIEDGSVQLADHYQQNTPIGDGPVLLPDNHYLSTQSALSKDPNEKRDHMVLLEFVTAAGITHGMDELYK

SEQ ID NO: 124 - protein, 214 aa, synthetic construct
  REGION 1..214: note = Description of Artificial Sequence: Synthetic polypeptide
MRIILLGAPGAGKGTQAQFIMEKYGIPQISTGDMLRAAVKSGSELGKQAKDIMDAGKLVTDELVIALVKERIAQEDCRNGFLLDGFPRTIPQADAMKEAGINVDYVLEFDVPDELIVDRIVGRRVHAPSGRVYHVKFNPPKVEGKDDVTGEELTTRKDDQEETVRKRLVEYHQMTAPLIGYYSKEAEAGNTKYAKVDGTKPVAEVRADLEKILG

SEQ ID NO: 125 - protein, 2172 aa, synthetic construct
  REGION 1..2172: note = Description of Artificial Sequence: Synthetic polypeptide
MKRTADGSEFESPKKKRKVDKKYSIGLDIGTNSVGWAVITDEYKVPSKKFKVLGNTDRHSIKKNLIGALLFDSGETAEATRLKRTARRRYTRRKNRICYLQEIFSNEMAKVDDSFFHRLEESFLVEEDKKHERHPIFGNIVDEVAYHEKYPTIYHLRKKLVDSTDKADLRLIYLALAHMIKFRGHFLIEGDLNPDNSDVDKLFIQLVQTYNQLFEENPINASGVDAKAILSARLSKSRRLENLIAQLPGEKKNGLFGNLIALSLGLTPNFKSNFDLAEDAKLQLSKDTYDDDLDNLLAQIGDQYADLFLAAKNLSDAILLSDILRVNTEITKAPLSASMIKRYDEHHQDLTLLKALVRQQLPEKYKEIFFDQSKNGYAGYIDGGASQEEFYKFIKPILEKMDGTEELLVKLNREDLLRKQRTFDNGSIPHQIHLGELHAILRRQEDFYPFLKDNREKIEKILTFRIPYYVGPLARGNSRFAWMTRKSEETITPWNFEEVVDKGASAQSFIERMTNFDKNLPNEKVLPKHSLLYEYFTVYNELTKVKYVTEGMRKPAFLSGEQKKAIVDLLFKTNRKVTVKQLKEDYFKKIECFDSVEISGVEDRFNASLGTYHDLLKIIKDKDFLDNEENEDILEDIVLTLTLFEDREMIEERLKTYAHLFDDKVMKQLKRRRYTGWGRLSRKLINGIRDKQSGKTILDFLKSDGFANRNFMQLIHDDSLTFKEDIQKAQVSGQGDSLHEHIANLAGSPAIKKGILQTVKVVDELVKVMGRHKPENIVIEMARENQTTQKGQKNSRERMKRIEEGIKELGSQILKEHPVENTQLQNEKLYLYYLQNGRDMYVDQELDINRLSDYDVDAIVPQSFLKDDSIDNKVLTRSDKNRGKSDNVPSEEVVKKMKNYWRQLLNAKLITQRKFDNLTKAERGGLSELDKAGFIKRQLVETRQITKHVAQILDSRMNTKYDENDKLIREVKVITLKSKLVSDFRKDFQFYKVREINNYHHAHDAYLNAVVGTALIKKYPKLESEFVYGDYKVYDVRKMIAKSEQEIGKATAKYFFYSNIMNFFKTEITLANGEIRKRPLIETNGETGEIVWDKGRDFATVRKVLSMPQVNIVKKTEVQTGGFSKESILPKRNSDKLIARKKDWDPKKYGGFDSPTVAYSVLVVAKVEKGKSKKLKSVKELLGITIMERSSFEKNPIDFLEAKGYKEVKKDLIIKLPKYSLFELENGRKRMLASAGELQKGNELALPSKYVNFLYLASHYEKLKGSPEDNEQKQLFVEQHKHYLDEIIEQISEFSKRVILADANLDKVLSAYNKHRDKPIREQAENIIHLFTLTNLGAPAAFKYFDTTIDRKRYTSTKEVLDATLIHQSITGLYETRIDLSQLGGDSGGSSGGSSGSETPGTSESATPESSGGSSGGSSTLNIEDEYRLHETSKEPDVSLGSTWLSDFPQAWAETGGMGLAVRQAPLIIPLKATSTPVSIKQYPMSQEARLGIKPHIQRLLDQGILVPCQSPWNTPLLPVKKPGTNDYRPVQDLREVNKRVEDIHPTVPNPYNLLSGLPPSHQWYTVLDLKDAFFCLRLHPTSQPLFAFEWRDPEMGISGQLTWTRLPQGFKNSPTLFNEALHRDLADFRIQHPDLILLQYVDDLLLAATSELDCQQGTRALLQTLGNLGYRASAKKAQICQKQVKYLGYLLKEGQRWLTEARKETVMGQPTPKTPRQLREFLGKAGFCRLFIPGFAEMAAPLYPLTKPGTLFNWGPDQQKAYQEIKQALLTAPALGLPDLTKPFELFVDEKQGYAKGVLTQKLGPWRRPVAYLSKKLDPVAAGWPPCLRMVAAIAVLTKDAGKLTMGQPLVILAPHAVEALVKQPPDRWLSNARMTHYQALLLDTDRVQFGPVVALNPATLLPLPEEGLQHNCLDILAEAHGTRPDLTDQPLPDADHTWYTDGSSLLQEGQRKAGAAVTTETEVIWAKALPAGTSAQRAELIALTQALKMAEGKKLNVYTDSRYAFATAHIHGEIYRRRGWLTSEGKEIKNKDEILALLKALFLPKRLSIIHCPGHQKGHSAEARGNRMADQAARKAAITETPDTSTLLIENSSPSGGSQYKLILNGKTLKGETTTEAVDAATAEKVFKQYANDNGVDGEWTYDDATKTFTVTEKRTADGSEFEPKKKRKV

SEQ ID NO: 126 - protein, 2172 aa, synthetic construct
  REGION 1..2172: note = Description of Artificial Sequence: Synthetic polypeptide
MKRTADGSEFESPKKKRKVDKKYSIGLDIGTNSVGWAVITDEYKVPSKKFKVLGNTDRHSIKKNLIGALLFDSGETAEATRLKRTARRRYTRRKNRICYLQEIFSNEMAKVDDSFFHRLEESFLVEEDKKHERHPIFGNIVDEVAYHEKYPTIYHLRKKLVDSTDKADLRLIYLALAHMIKFRGHFLIEGDLNPDNSDVDKLFIQLVQTYNQLFEENPINASGVDAKAILSARLSKSRRLENLIAQLPGEKKNGLFGNLIALSLGLTPNFKSNFDLAEDAKLQLSKDTYDDDLDNLLAQIGDQYADLFLAAKNLSDAILLSDILRVNTEITKAPLSASMIKRYDEHHQDLTLLKALVRQQLPEKYKEIFFDQSKNGYAGYIDGGASQEEFYKFIKPILEKMDGTEELLVKLNREDLLRKQRTFDNGSIPHQIHLGELHAILRRQEDFYPFLKDNREKIEKILTFRIPYYVGPLARGNSRFAWMTRKSEETITPWNFEEVVDKGASAQSFIERMTNFDKNLPNEKVLPKHSLLYEYFTVYNELTKVKYVTEGMRKPAFLSGEQKKAIVDLLFKTNRKVTVKQLKEDYFKKIECFDSVEISGVEDRFNASLGTYHDLLKIIKDKDFLDNEENEDILEDIVLTLTLFEDREMIEERLKTYAHLFDDKVMKQLKRRRYTGWGRLSRKLINGIRDKQSGKTILDFLKSDGFANRNFMQLIHDDSLTFKEDIQKAQVSGQGDSLHEHIANLAGSPAIKKGILQTVKVVDELVKVMGRHKPENIVIEMARENQTTQKGQKNSRERMKRIEEGIKELGSQILKEHPVENTQLQNEKLYLYYLQNGRDMYVDQELDINRLSDYDVDAIVPQSFLKDDSIDNKVLTRSDKNRGKSDNVPSEEVVKKMKNYWRQLLNAKLITQRKFDNLTKAERGGLSELDKAGFIKRQLVETRQITKHVAQILDSRMNTKYDENDKLIREVKVITLKSKLVSDFRKDFQFYKVREINNYHHAHDAYLNAVVGTALIKKYPKLESEFVYGDYKVYDVRKMIAKSEQEIGKATAKYFFYSNIMNFFKTEITLANGEIRKRPLIETNGETGEIVWDKGRDFATVRKVLSMPQVNIVKKTEVQTGGFSKESILPKRNSDKLIARKKDWDPKKYGGFDSPTVAYSVLVVAKVEKGKSKKLKSVKELLGITIMERSSFEKNPIDFLEAKGYKEVKKDLIIKLPKYSLFELENGRKRMLASAGELQKGNELALPSKYVNFLYLASHYEKLKGSPEDNEQKQLFVEQHKHYLDEIIEQISEFSKRVILADANLDKVLSAYNKHRDKPIREQAENIIHLFTLTNLGAPAAFKYFDTTIDRKRYTSTKEVLDATLIHQSITGLYETRIDLSQLGGDSGGSSGGSSGSETPGTSESATPESSGGSSGGSSTLNIEDEYRLHETSKEPDVSLGSTWLSDFPQAWAETGGMGLAVRQAPLIIPLKATSTPVSIKQYPMSQEARLGIKPHIQRLLDQGILVPCQSPWNTPLLPVKKPGTNDYRPVQDLREVNKRVEDIHPTVPNPYNLLSGLPPSHQWYTVLDLKDAFFCLRLHPTSQPLFAFEWRDPEMGISGQLTWTRLPQGFKNSPTLFNEALHRDLADFRIQHPDLILLQYVDDLLLAATSELDCQQGTRALLQTLGNLGYRASAKKAQICQKQVKYLGYLLKEGQRWLTEARKETVMGQPTPKTPRQLREFLGKAGFCRLFIPGFAEMAAPLYPLTKPGTLFNWGPDQQKAYQEIKQALLTAPALGLPDLTKPFELFVDEKQGYAKGVLTQKLGPWRRPVAYLSKKLDPVAAGWPPCLRMVAAIAVLTKDAGKLTMGQPLVILAPHAVEALVKQPPDRWLSNARMTHYQALLLDTDRVQFGPVVALNPATLLPLPEEGLQHNCLDILAEAHGTRPDLTDQPLPDADHTWYTDGSSLLQEGQRKAGAAVTTETEVIWAKALPAGTSAQRAELIALTQALKMAEGKKLNVYTDSRYAFATAHIHGEIYRRRGWLTSEGKEIKNKDEILALLKALFLPKRLSIIHCPGHQKGHSAEARGNRMADQAARKAAITETPDTSTLLIENSSPSGGSQYKLILNGKTLKGETTTEAVNAATAEKVFKQYANRNGVDGKWTYDDATKTFTVTEKRTADGSEFEPKKKRKV

SEQ ID NO: 127 - protein, 1992 aa, synthetic construct
  REGION 1..1992: note = Description of Artificial Sequence: Synthetic polypeptide
MKRTADGSEFESPKKKRKVDKKYSIGLDIGTNSVGWAVITDEYKVPSKKFKVLGNTDRHSIKKNLIGALLFDSGETAEATRLKRTARRRYTRRKNRICYLQEIFSNEMAKVDDSFFHRLEESFLVEEDKKHERHPIFGNIVDEVAYHEKYPTIYHLRKKLVDSTDKADLRLIYLALAHMIKFRGHFLIEGDLNPDNSDVDKLFIQLVQTYNQLFEENPINASGVDAKAILSARLSKSRRLENLIAQLPGEKKNGLFGNLIALSLGLTPNFKSNFDLAEDAKLQLSKDTYDDDLDNLLAQIGDQYADLFLAAKNLSDAILLSDILRVNTEITKAPLSASMIKRYDEHHQDLTLLKALVRQQLPEKYKEIFFDQSKNGYAGYIDGGASQEEFYKFIKPILEKMDGTEELLVKLNREDLLRKQRTFDNGSIPHQIHLGELHAILRRQEDFYPFLKDNREKIEKILTFRIPYYVGPLARGNSRFAWMTRKSEETITPWNFEEVVDKGASAQSFIERMTNFDKNLPNEKVLPKHSLLYEYFTVYNELTKVKYVTEGMRKPAFLSGEQKKAIVDLLFKTNRKVTVKQLKEDYFKKIECFDSVEISGVEDRFNASLGTYHDLLKIIKDKDFLDNEENEDILEDIVLTLTLFEDREMIEERLKTYAHLFDDKVMKQLKRRRYTGWGRLSRKLINGIRDKQSGKTILDFLKSDGFANRNFMQLIHDDSLTFKEDIQKAQVSGQGDSLHEHIANLAGSPAIKKGILQTVKVVDELVKVMGRHKPENIVIEMARENQTTQKGQKNSRERMKRIEEGIKELGSQILKEHPVENTQLQNEKLYLYYLQNGRDMYVDQELDINRLSDYDVDAIVPQSFLKDDSIDNKVLTRSDKNRGKSDNVPSEEVVKKMKNYWRQLLNAKLITQRKFDNLTKAERGGLSELDKAGFIKRQLVETRQITKHVAQILDSRMNTKYDENDKLIREVKVITLKSKLVSDFRKDFQFYKVREINNYHHAHDAYLNAVVGTALIKKYPKLESEFVYGDYKVYDVRKMIAKSEQEIGKATAKYFFYSNIMNFFKTEITLANGEIRKRPLIETNGETGEIVWDKGRDFATVRKVLSMPQVNIVKKTEVQTGGFSKESILPKRNSDKLIARKKDWDPKKYGGFDSPTVAYSVLVVAKVEKGKSKKLKSVKELLGITIMERSSFEKNPIDFLEAKGYKEVKKDLIIKLPKYSLFELENGRKRMLASAGELQKGNELALPSKYVNFLYLASHYEKLKGSPEDNEQKQLFVEQHKHYLDEIIEQISEFSKRVILADANLDKVLSAYNKHRDKPIREQAENIIHLFTLTNLGAPAAFKYFDTTIDRKRYTSTKEVLDATLIHQSITGLYETRIDLSQLGGDSGGSSGGSSGSETPGTSESATPESSGGSSGGSSTLNIEDEYRLHETSKEPDVSLGSTWLSDFPQAWAETGGMGLAVRQAPLIIPLKATSTPVSIKQYPMSQEARLGIKPHIQRLLDQGILVPCQSPWNTPLLPVKKPGTNDYRPVQDLREVNKRVEDIHPTVPNPYNLLSGLPPSHQWYTVLDLKDAFFCLRLHPTSQPLFAFEWRDPEMGISGQLTWTRLPQGFKNSPTLFNEALHRDLADFRIQHPDLILLQYVDDLLLAATSELDCQQGTRALLQTLGNLGYRASAKKAQICQKQVKYLGYLLKEGQRWLTEARKETVMGQPTPKTPRQLREFLGKAGFCRLFIPGFAEMAAPLYPLTKPGTLFNWGPDQQKAYQEIKQALLTAPALGLPDLTKPFELFVDEKQGYAKGVLTQKLGPWRRPVAYLSKKLDPVAAGWPPCLRMVAAIAVLTKDAGKLTMGQPLVILAPHAVEALVKQPPDRWLSNARMTHYQALLLDTDRVQFGPVVALNPATLLPLPEEGLQHNCLDSGGSQYKLILNGKTLKGETTTEAVDAATAEKVFKQYANDNGVDGEWTYDDATKTFTVTEKRTADGSEFEPKKKRKV

SEQ ID NO: 128 - protein, 1992 aa, synthetic construct
  REGION 1..1992: note = Description of Artificial Sequence: Synthetic polypeptide
MKRTADGSEFESPKKKRKVDKKYSIGLDIGTNSVGWAVITDEYKVPSKKFKVLGNTDRHSIKKNLIGALLFDSGETAEATRLKRTARRRYTRRKNRICYLQEIFSNEMAKVDDSFFHRLEESFLVEEDKKHERHPIFGNIVDEVAYHEKYPTIYHLRKKLVDSTDKADLRLIYLALAHMIKFRGHFLIEGDLNPDNSDVDKLFIQLVQTYNQLFEENPINASGVDAKAILSARLSKSRRLENLIAQLPGEKKNGLFGNLIALSLGLTPNFKSNFDLAEDAKLQLSKDTYDDDLDNLLAQIGDQYADLFLAAKNLSDAILLSDILRVNTEITKAPLSASMIKRYDEHHQDLTLLKALVRQQLPEKYKEIFFDQSKNGYAGYIDGGASQEEFYKFIKPILEKMDGTEELLVKLNREDLLRKQRTFDNGSIPHQIHLGELHAILRRQEDFYPFLKDNREKIEKILTFRIPYYVGPLARGNSRFAWMTRKSEETITPWNFEEVVDKGASAQSFIERMTNFDKNLPNEKVLPKHSLLYEYFTVYNELTKVKYVTEGMRKPAFLSGEQKKAIVDLLFKTNRKVTVKQLKEDYFKKIECFDSVEISGVEDRFNASLGTYHDLLKIIKDKDFLDNEENEDILEDIVLTLTLFEDREMIEERLKTYAHLFDDKVMKQLKRRRYTGWGRLSRKLINGIRDKQSGKTILDFLKSDGFANRNFMQLIHDDSLTFKEDIQKAQVSGQGDSLHEHIANLAGSPAIKKGILQTVKVVDELVKVMGRHKPENIVIEMARENQTTQKGQKNSRERMKRIEEGIKELGSQILKEHPVENTQLQNEKLYLYYLQNGRDMYVDQELDINRLSDYDVDAIVPQSFLKDDSIDNKVLTRSDKNRGKSDNVPSEEVVKKMKNYWRQLLNAKLITQRKFDNLTKAERGGLSELDKAGFIKRQLVETRQITKHVAQILDSRMNTKYDENDKLIREVKVITLKSKLVSDFRKDFQFYKVREINNYHHAHDAYLNAVVGTALIKKYPKLESEFVYGDYKVYDVRKMIAKSEQEIGKATAKYFFYSNIMNFFKTEITLANGEIRKRPLIETNGETGEIVWDKGRDFATVRKVLSMPQVNIVKKTEVQTGGFSKESILPKRNSDKLIARKKDWDPKKYGGFDSPTVAYSVLVVAKVEKGKSKKLKSVKELLGITIMERSSFEKNPIDFLEAKGYKEVKKDLIIKLPKYSLFELENGRKRMLASAGELQKGNELALPSKYVNFLYLASHYEKLKGSPEDNEQKQLFVEQHKHYLDEIIEQISEFSKRVILADANLDKVLSAYNKHRDKPIREQAENIIHLFTLTNLGAPAAFKYFDTTIDRKRYTSTKEVLDATLIHQSITGLYETRIDLSQLGGDSGGSSGGSSGSETPGTSESATPESSGGSSGGSSTLNIEDEYRLHETSKEPDVSLGSTWLSDFPQAWAETGGMGLAVRQAPLIIPLKATSTPVSIKQYPMSQEARLGIKPHIQRLLDQGILVPCQSPWNTPLLPVKKPGTNDYRPVQDLREVNKRVEDIHPTVPNPYNLLSGLPPSHQWYTVLDLKDAFFCLRLHPTSQPLFAFEWRDPEMGISGQLTWTRLPQGFKNSPTLFNEALHRDLADFRIQHPDLILLQYVDDLLLAATSELDCQQGTRALLQTLGNLGYRASAKKAQICQKQVKYLGYLLKEGQRWLTEARKETVMGQPTPKTPRQLREFLGKAGFCRLFIPGFAEMAAPLYPLTKPGTLFNWGPDQQKAYQEIKQALLTAPALGLPDLTKPFELFVDEKQGYAKGVLTQKLGPWRRPVAYLSKKLDPVAAGWPPCLRMVAAIAVLTKDAGKLTMGQPLVILAPHAVEALVKQPPDRWLSNARMTHYQALLLDTDRVQFGPVVALNPATLLPLPEEGLQHNCLDSGGSQYKLILNGKTLKGETTTEAVNAATAEKVFKQYANRNGVDGKWTYDDATKTFTVTEKRTADGSEFEPKKKRKV

SEQ ID NO: 129 - protein, 434 aa, unidentified
  REGION 1..434: note = Description of Unknown: Candidatus Magnetomorum sp. HK-1 sequence
STIDVTLKEVADPIRLKLAWTKIKKKGSIGGVDGVTISSFNANLEVNLSELSNQILTNQYTPEPLQAAHIPKPGKSEKRQLGLPSLKDKIVQSSLASILSDFYEIHFSNCSYAYRPGKGSVKAIGRVRDFLNRKNYWIASVDIDNFFDSVDHEICTSILKEQISDQSIIRLISLYFSSGMIKFDQWQDTEIGIPQGGAISPVISNIYLNKLDHFLHTLNAFFVRYADDIILFSNTQQSLSETYQKTNEFLNKKLNLKLNALDNPIINVSKGFSFLGIYFHRCQLKIDFKRIDEKIEKMKYIIHKQKQIDAVIKEINEFFNGVQRHYGNIIPDSYQLKNLESTVLDELSIFLAKMKNEGHINSKKACKLVLDPLVFMSERTKSQRDAVIDKIIADAFTIVDQKKDTDEKRIEKSVDSAIHQKRQAYAKKIATETE

SEQ ID NO: 130 - protein, 361 aa, Marinomonas mediterranea
MGQYQLQDAYGYCSYPRPQAAKSLLEKSLSDASLHQACQTMYPRQANFDSSDTDEEHHDAIDELLTKLYVSRERIFKREFTPSQLHSVEIEKPEGGTRLLSVPNWHDRTLQKAVTECLGNTLEHIWMKHSYGYRKGHSRLQARDQINQYIQQGYEWVLESDIESFFDSVNWLNLEQRLKLLLPNEPLVPLLMQWVSAAKQTEDEQTLARHNGLPQGAPISPILANLLLDDLDQDMIAKGHQIVRYADDFVLLFKSKAAAESALDDIITALKEHHLAINLEKTRIVEASQGFRYLGYLFGGSQYKLILNGKTLKGETTTEAVDAATAEKVFKQYANDNGVDGEWTYDDATKTFTVTEGGSKL

SEQ ID NO: 131 - protein, 391 aa, Chlorobium limicola
MGWLYNQMAMPETIFQAWYKVASNDGRPGWDNKSIEDYSLQLEENLKALSQALLTGTYKQGPLMKLVLLKPDGKDRVLLIPGVMDRVAQTAAAIVLSPIIEAELGNCTFAYRPGISREGAAREIDRLHREGYQWVLDADIRSFFDNVRHDLLFQRLVELIDDKEMISLLHRWLTAEIVDGINPRIQNTMGLPQGCPISPALANLYLDRFDETMEKEGFKLVRFADDYLVLCKTRPKAEAALKLSETALAELKLELHSDKTRITTFAEGFKYLGYLFIRALVIPTKMHPEEWYDKLGKFKLRKKSEHALPSDPDAMTGETAKFELETDQGEKIELTKNELLQTEFGCKLLESLDKKQLSVDEFLEKVARQDEERQKEKRDALKKLYSPFLNT

SEQ ID NO: 132 - protein, 386 aa, Tibeticola sediminis
MGTANELPLLEQALSDDRLLAGWERVRANAGGPGVDGVTVEQFGGKVLRALAGLRQRVTASHYQALPLRRIEITRPGKAPRVLAVPCVADRVVQSAVALTISPRLDPGFEDFSFGYRPGRSVPRAVQHLAEARDSGLVWVAEADIQSCFDRIPWAALLQRLGEVLPDAGLLALIQHWLSLPLQWPDGHQQVRCMGVPQGSPLSPLLSNVFLDGMDKELAAGPWRVIRYADDFVIAAASREEARRGLAQAARWLRRLGLRLNLDKTRVIHFDQGFSFLGVRFRGRQMSAVQPGAEPWVLPRATQPRPHSPSSKPAQHSRSPAPTARASAPATPPSAQPEPLGPAAPSPNAAASAQPSQPRAADATLQDLQRLSVAPPNEPSPPRLRT

SEQ ID NO: 133 - protein, 330 aa, unidentified
  REGION 1..330: note = Description of Unknown: Candidatus Accumulibacter sp. SK-02 sequence
STLPTPSSTDQDSPPPFWTLARLAEALEHVSARQGGAGADEQTLAEFAADAEAQLGLLALQLTQGSYRPAPARLIPVAKPGGGVRELLLPAVRDRIVQSALARYLADLLEPDFGEASHAYRPGHSVATALHRLQALRDGGLVFVAVCDIHHFFDSVDHRRLFSLLDDLPLERRLREQMKTCVRIEVADVQGQGAWSLARGLAQGSPLSPVLANLFLMAFDAACARAGLALVRYADDCVLACASETEAQSALAFAADALENIGLALNTRKSRLASFAEGFEFLGAFCGAEGMLGGRPGEAACLPPTTGPVHEAAAADDERPPSHGHRPRLR

SEQ ID NO: 134 - protein, 325 aa, Halomicronema hongdechloris
MLYVEQLATAWHLVQRGSRAAGIDGITVDLFTGIAREQIHQLYRQMRQERYVARPAKGFYLAKQKGGHRLIGIPTVRDRIVQRYLLQSIYPSLENAFSDAVFAYRPGLSIYAAVKRVMERYRYQPTWVIKADIQQFFDQLSWPLLLHQLDQLSLPATWVQWIEQQLKAGIVVSGQFYQPGQGVLPGSILSGALANLYLNDFDRHCLEADIPLVRYGDDCVAVCQSYLEASRSLALMQDWIEGLSLSFHPEKTTIIPPGQAFVFLGHRFRNGTVEGPARQKAEGRRQKAPQPGYGPPQLCSIVKSPRRMLATSTDDYWRDGMTTKL

SEQ ID NO: 135 - protein, 337 aa, Nostoc sp.
MFTQEHLHFAWLQVCAGSKTAGVDGISVELFESMATEQLQNLVYQLNNETYTASPAKGFYIPKKNGDKRLVGIPTVRDRIIQRLLLDELYFPLEGTFLDCSYAYRPGHNILQAVQHLYGYYQYQPKWIIKADVADFFDNLSWALLLTFLEKLSLEPSVLQLIEQQLQSGMIIAGQYRNFGKGVLQGGILSGALANLYLTNFDKKCLSQGINLVRYGDDFVIACNSWQEANRILDKITVWLGEVYLTLQSEKTQIFTPNDEFTFLGYRFAGGEVYAPPPPKPVLKGEWVINDSGNPYFRTKPRPKKPVSHPPKACSIDKPINFPRASLSHYWQETMTT

SEQ ID NO: 136 - protein, 325 aa, Buchananella hordeovulneris
ETSVRHLGELTYPLRASAAFQRQALTGEPDLLTEIAAPDSLLNAWRYVFTRDAKDGYLLQQSQQIAADPDRFVAALSGALLSGRYQPEPQVEVLIPKKGKTSAMRELSIPSIRDRVVERAVLNAIIDRADLLQCSASFAFRRGLGVQAATHEITQLRDSGNRYVLLTDIANYFGRINIADSLRVLQRGLFCSRTLALLRFIAKPRRVVGRRRIRSRGLAQGSCLSPLLANLALTDIDFALADTGVGYVRFADDILLCAPSRTELAASQRLLASLAAHQGLQLNEEKTMHTSFDAGFCYLGVDFTAHQPVTDLHYGVKHTKQPAKV

SEQ ID NO: 137 - protein, 56 aa, synthetic construct
  REGION 1..56: note = Description of Artificial Sequence: Synthetic polypeptide
MQYKLILNGKTLKGETTTEAVNAATAEKVFKQYANRNGVDGKWTYDDATKTFTVTE

SEQ ID NO: 138 - protein, 1368 aa, Streptococcus pyogenes [sequence omitted]

SEQ ID NO: 139 - protein, 1054 aa, Staphylococcus lugdunensis
MNQKFILGLDIGITSVGYGLIDYETKNIIDAGVRLFPEANVENNEGRRSKRGSRRLKRRRIHRLERVKKLLEDYNLLDQSQIPQSTNPYAIRVKGLSEALSKDELVIALLHIAKRRGIHKIDVIDSNDDVGNELSTKEQLNKNSKLLKDKFVCQIQLERMNEGQVRGEKNRFKTADIIKEIIQLLNVQKNFHQLDENFINKYIELVEMRREYFEGPGKGSPYGWEGDPKAWYETLMGHCTYFPDELRSVKYAYSADLFNALNDLNNLVIQRDGLSKLEYHEKYHIIENVFKQKKKPTLKQIANEINVNPEDIKGYRITKSGKPQFTEFKLYHDLKSVLFDQSILENEDVLDQIAEILTIYQDKDSIKSKLTELDILLNEEDKENIAQLTGYTGTHRLSLKCIRLVLEEQWYSSRNQMEIFTHLNIKPKKINLTAANKIPKAMIDEFILSPVVKRTFGQAINLINKIIEKYGVPEDIIIELARENNSKDKQKFINEMQKKNENTRKRINEIIGKYGNQNAKRLVEKIRLHDEQEGKCLYSLESIPLEDLLNNPNHYEVDHIIPRSVSFDNSYHNKVLVKQSENSKKSNLTPYQYFNSGKSKLSYNQFKQHILNLSKSQDRISKKKKEYLLEERDINKFEVQKEFINRNLVDTRYATRELTNYLKAYFSANNMNVKVKTINGSFTDYLRKVWKFKKERNHGYKHHAEDALIIANADFLFKENKKLKAVNSVLEKPEIESKQLDIQVDSEDNYSEMFIIPKQVQDIKDFRNFKYSHRVDKKPNRQLINDTLYSTRKKDNSTYIVQTIKDIYAKDNTTLKKQFDKSPEKFLMYQHDPRTFEKLEVIMKQYANEKNPLAKYHEETGEYLTKYSKKNNGPIVKSLKYIGNKLGSHLDVTHQFKSSTKKLVKLSIKPYRFDVYLTDKGYKFITISYLDVLKKDNYYYIPEQKYDKLKLGKAIDKNAKFIASFYKNDLIKLDGEIYKIIGVNSDTRNMIELDLPDIRYKEYCELNNIKGEPRIKKTIGKKVNSIEKLTTDVLGNVFTNTQYTKPQLLFKRGN

SEQ ID NO: 140 - protein, 1052 aa, Staphylococcus aureus
MKRNYILGLDIGITSVGYGIIDYETRDVIDAGVRLFKEANVENNEGRRSKRGARRLKRRRRHRIQRVKKLLFDYNLLTDHSELSGINPYEARVKGLSQKLSEEEFSAALLHLAKRRGVHNVNEVEEDTGNELSTKEQISRNSKALEEKYVAELQLERLKKDGEVRGSINRFKTSDYVKEAKQLLKVQKAYHQLDQSFIDTYIDLLETRRTYYEGPGEGSPFGWKDIKEWYEMLMGHCTYFPEELRSVKYAYNADLYNALNDLNNLVITRDENEKLEYYEKFQIIENVFKQKKKPTLKQIAKEILVNEEDIKGYRVTSTGKPEFTNLKVYHDIKDITARKEIIENAELLDQIAKILTIYQSSEDIQEELTNLNSELTQEEIEQISNLKGYTGTHNLSLKAINLILDELWHTNDNQIAIFNRLKLVPKKVDLSQQKEIPTTLVDDFILSPVVKRSFIQSIKVINAIIKKYGLPNDIIIELAREKNSKDAQKMINEMQKRNRQTNERIEEIIRTTGKENAKYLIEKIKLHDMQEGKCLYSLEAIPLEDLLNNPFNYEVDHIIPRSVSFDNSFNNKVLVKQEEASKKGNRTPFQYLSSSDSKISYETFKKHILNLAKGKGRISKTKKEYLLEERDINRFSVQKDFINRNLVDTRYATRGLMNLLRSYFRVNNLDVKVKSINGGFTSFLRRKWKFKKERNKGYKHHAEDALIIANADFIFKEWKKLDKAKKVMENQMFEEKQAESMPEIETEQEYKEIFITPHQIKHIKDFKDYKYSHRVDKKPNRELINDTLYSTRKDDKGNTLIVNNLNGLYDKDNDKLKKLINKSPEKLLMYHHDPQTYQKLKLIMEQYGDEKNPLYKYYEETGNYLTKYSKKDNGPVIKKIKYYGNKLNAHLDITDDYPNSRNKVVKLSLKPYRFDVYLDNGVYKFVTVKNLDVIKKENYYEVNSKCYEEAKKLKKISNQAEFIASFYNNDLIKINGELYRVIGVNNDLLNRIEVNMIDITYREYLENMNDKRPPRIIKTIASKTQSIKKYSTDILGNLYEVKSKKHPQIIKK

SEQ ID NO: 141 - protein, 1368 aa, synthetic construct
  REGION 1..1368: note = Description of Artificial Sequence: Synthetic polypeptide
MDKKYSIGLDIGTNSVGWAVITDEYKVPSKKFKVLGNTDRHSIKKNLIGALLFDSGETAEATRLKRTARRRYTRRKNRICYLQEIFSNEMAKVDDSFFHRLEESFLVEEDKKHERHPIFGNIVDEVAYHEKYPTIYHLRKKLVDSTDKADLRLIYLALAHMIKFRGHFLIEGDLNPDNSDVDKLFIQLVQTYNQLFEENPINASGVDAKAILSARLSKSRRLENLIAQLPGEKKNGLFGNLIALSLGLTPNFKSNFDLAEDAKLQLSKDTYDDDLDNLLAQIGDQYADLFLAAKNLSDAILLSDILRVNTEITKAPLSASMIKRYDEHHQDLTLLKALVRQQLPEKYKEIFFDQSKNGYAGYIDGGASQEEFYKFIKPILEKMDGTEELLVKLNREDLLRKQRTFDNGSIPHQIHLGELHAILRRQEDFYPFLKDNREKIEKILTFRIPYYVGPLARGNSRFAWMTRKSEETITPWNFEEVVDKGASAQSFIERMTNFDKNLPNEKVLPKHSLLYEYFTVYNELTKVKYVTEGMRKPAFLSGEQKKAIVDLLFKTNRKVTVKQLKEDYFKKIECFDSVEISGVEDRFNASLGTYHDLLKIIKDKDFLDNEENEDILEDIVLTLTLFEDREMIEERLKTYAHLFDDKVMKQLKRRRYTGWGRLSRKLINGIRDKQSGKTILDFLKSDGFANRNFMQLIHDDSLTFKEDIQKAQVSGQGDSLHEHIANLAGSPAIKKGILQTVKVVDELVKVMGRHKPENIVIEMARENQTTQKGQKNSRERMKRIEEGIKELGSQILKEHPVENTQLQNEKLYLYYLQNGRDMYVDQELDINRLSDYDVDHIVPQSFLKDDSIDNKVLTRSDKNRGKSDNVPSEEVVKKMKNYWRQLLNAKLITQRKFDNLTKAERGGLSELDKAGFIKRQLVETRQITKHVAQILDSRMNTKYDENDKLIREVKVITLKSKLVSDFRKDFQFYKVREINNYHHAHDAYLNAVVGTALIKKYPKLESEFVYGDYKVYDVRKMIAKSEQEIGKATAKYFFYSNIMNFFKTEITLANGEIRKRPLIETNGETGEIVWDKGRDFATVRKVLSMPQVNIVKKTEVQTGGFSKESIRPKRNSDKLIARKKDWDPKKYGGFVSPTVAYSVLVVAKVEKGKSKKLKSVKELLGITIMERSSFEKNPIDFLEAKGYKEVKKDLIIKLPKYSLFELENGRKRMLASARFLQKGNELALPSKYVNFLYLASHYEKLKGSPEDNEQKQLFVEQHKHYLDEIIEQISEFSKRVILADANLDKVLSAYNKHRDKPIREQAENIIHLFTLTNLGAPRAFKYFDTTIDRKVYRSTKEVLDATLIHQSITGLYETRIDLSQLGGD

SEQ ID NO: 142 - protein, 1108 aa, Caldibacillus hisashii
MATRSFILKIEPNEEVKKGLWKTHEVLNHGIAYYMNILKLIRQEAIYEHHEQDPKNPKKVSKAEIQAELWDFVLKMQKCNSFTHEVDKDEVFNILRELYEELVPSSVEKKGEANQLSNKFLYPLVDPNSQSGKGTASSGRKPRWYNLKIAGDPSWEEEKKKWEEDKKKDPLAKILGKLAEYGLIPLFIPYTDSNEPIVKEIKWMEKSRNQSVRRLDKDMFIQALERFLSWESWNLKVKEEYEKVEKEYKTLEERIKEDIQALKALEQYEKERQEQLLRDTLNTNEYRLSKRGLRGWREIIQKWLKMDENEPSEKYLEVFKDYQRKHPREAGDYSVYEFLSKKENHFIWRNHPEYPYLYATFCEIDKKKKDAKQQATFTLADPINHPLWVRFEERSGSNLNKYRILTEQLHTEKLKKKLTVQLDRLIYPTESGGWEEKGKVDIVLLPSRQFYNQIFLDIEEKGKHAFTYKDESIKFPLKGTLGGARVQFDRDHLRRYPHKVESGNVGRIYFNMTVNIEPTESPVSKSLKIHRDDFPKVVNFKPKELTEWIKDSKGKKLKSGIESLEIGLRVMSIDLGQRQAAAASIFEVVDQKPDIEGKLFFPIKGTELYAVHRASFNIKLPGETLVKSREVLRKAREDNLKLMNQKLNFLRNVLHFQQFEDITEREKRVTKWISRQENSDVPLVYQDELIQIRELMYKPYKDWVAFLKQLHKRLEVEIGKEVKHWRKSLSDGRKGLYGISLKNIDEIDRTRKFLLRWSLRPTEPGEVRRLEPGQRFAIDQLNHLNALKEDRLKKMANTIIMHALGYCYDVRKKKWQAKNPACQIILFEDLSNYNPYEERSRFENSKLMKWSRREIPRQVALQGEIYGLQVGEVGAQFSSRFHAKTGSPGIRCSVVTKEKLQDNRFFKNLQREGRLTLDKIAVLKEGDLYPDKGGEKFISLSKDRKCVTTHADINAAQNLQKRFWTRTHGFYKVYCKAYQVDGQTVYIPESKDQKQKIIEEFGEGYFILKDGVYEWVNAGKLKIKKGSSKQSSSELVDSDILKDSFDLASELKGEKLMLYRDPSGNVFPSDKWMAAGVFFGKLERILISKLTNQYSISTIEDDSSKQSM

SEQ ID NO: 143 - protein, 1368 aa, synthetic construct
  REGION 1..1368: note = Description of Artificial Sequence: Synthetic polypeptide
MDKKYSIGLDIGTNSVGWAVITDEYKVPSKKFKVLGNTDRHSIKKNLIGALLFDSGETAEATRLKRTARRRYTRRKNRICYLQEIFSNEMAKVDDSFFHRLEESFLVEEDKKHERHPIFGNIVDEVAYHEKYPTIYHLRKKLVDSTDKADLRLIYLALAHMIKFRGHFLIEGDLNPDNSDVDKLFIQLVQTYNQLFEENPINASGVDAKAILSARLSKSRRLENLIAQLPGEKKNGLFGNLIALSLGLTPNFKSNFDLAEDAKLQLSKDTYDDDLDNLLAQIGDQYADLFLAAKNLSDAILLSDILRVNTEITKAPLSASMIKRYDEHHQDLTLLKALVRQQLPEKYKEIFFDQSKNGYAGYIDGGASQEEFYKFIKPILEKMDGTEELLVKLNREDLLRKQRTFDNGSIPHQIHLGELHAILRRQEDFYPFLKDNREKIEKILTFRIPYYVGPLARGNSRFAWMTRKSEETITPWNFEEVVDKGASAQSFIERMTNFDKNLPNEKVLPKHSLLYEYFTVYNELTKVKYVTEGMRKPAFLSGEQKKAIVDLLFKTNRKVTVKQLKEDYFKKIECFDSVEISGVEDRFNASLGTYHDLLKIIKDKDFLDNEENEDILEDIVLTLTLFEDREMIEERLKTYAHLFDDKVMKQLKRRRYTGWGRLSRKLINGIRDKQSGKTILDFLKSDGFANRNFMQLIHDDSLTFKEDIQKAQVSGQGDSLHEHIANLAGSPAIKKGILQTVKVVDELVKVMGRHKPENIVIEMARENQTTQKGQKNSRERMKRIEEGIKELGSQILKEHPVENTQLQNEKLYLYYLQNGRDMYVDQELDINRLSDYDVDHIVPQSFLKDDSIDNKVLTRSDKNRGKSDNVPSEEVVKKMKNYWRQLLNAKLITQRKFDNLTKAERGGLSELDKAGFIKRQLVETRQITKHVAQILDSRMNTKYDENDKLIREVKVITLKSKLVSDFRKDFQFYKVREINNYHHAHDAYLNAVVGTALIKKYPKLESEFVYGDYKVYDVRKMIAKSEQEIGKATAKYFFYSNIMNFFKTEITLANGEIRKRPLIETNGETGEIVWDKGRDFATVRKVLSMPQVNIVKKTEVQTGGFSKESILPKRNSDKLIARKKDWDPKKYGGFVSPTVAYSVLVVAKVEKGKSKKLKSVKELLGITIMERSSFEKNPIDFLEAKGYKEVKKDLIIKLPKYSLFELENGRKRMLASARELQKGNELALPSKYVNFLYLASHYEKLKGSPEDNEQKQLFVEQHKHYLDEIIEQISEFSKRVILADANLDKVLSAYNKHRDKPIREQAENIIHLFTLTNLGAPAAFKYFDTTIDRKQYRSTKEVLDATLIHQSITGLYETRIDLSQLGGD

SEQ ID NO: 144 - protein, 1368 aa, synthetic construct
  REGION 1..1368: note = Description of Artificial Sequence: Synthetic polypeptide
MDKKYSIGLDIGTNSVGWAVITDEYKVPSKKFKVLGNTDRHSIKKNLIGALLFDSGETAERTRLKRTARRRYTRRKNRICYLQEIFSNEMAKVDDSFFHRLEESFLVEEDKKHERHPIFGNIVDEVAYHEKYPTIYHLRKKLVDSTDKADLRLIYLALAHMIKFRGHFLIEGDLNPDNSDVDKLFIQLVQTYNQLFEENPINASGVDAKAILSARLSKSRRLENLIAQLPGEKKNGLFGNLIALSLGLTPNFKSNFDLAEDAKLQLSKDTYDDDLDNLLAQIGDQYADLFLAAKNLSDAILLSDILRVNTEITKAPLSASMIKRYDEHHQDLTLLKALVRQQLPEKYKEIFFDQSKNGYAGYIDGGASQEEFYKFIKPILEKMDGTEELLVKLNREDLLRKQRTFDNGSIPHQIHLGELHAILRRQEDFYPFLKDNREKIEKILTFRIPYYVGPLARGNSRFAWMTRKSEETITPWNFEEVVDKGASAQSFIERMTNFDKNLPNEKVLPKHSLLYEYFTVYNELTKVKYVTEGMRKPAFLSGEQKKAIVDLLFKTNRKVTVKQLKEDYFKKIECFDSVEISGVEDRFNASLGTYHDLLKIIKDKDFLDNEENEDILEDIVLTLTLFEDREMIEERLKTYAHLFDDKVMKQLKRRRYTGWGRLSRKLINGIRDKQSGKTILDFLKSDGFANRNFMQLIHDDSLTFKEDIQKAQVSGQGDSLHEHIANLAGSPAIKKGILQTVKVVDELVKVMGRHKPENIVIEMARENQTTQKGQKNSRERMKRIEEGIKELGSQILKEHPVENTQLQNEKLYLYYLQNGRDMYVDQELDINRLSDYDVDHIVPQSFLKDDSIDNKVLTRSDKNRGKSDNVPSEEVVKKMKNYWRQLLNAKLITQRKFDNLTKAERGGLSELDKAGFIKRQLVETRQITKHVAQILDSRMNTKYDENDKLIREVKVITLKSKLVSDFRKDFQFYKVREINNYHHAHDAYLNAVVGTALIKKYPKLESEFVYGDYKVYDVRKMIAKSEQEIGKATAKYFFYSNIMNFFKTEITLANGEIRKRPLIETNGETGEIVWDKGRDFATVRKVLSMPQVNIVKKTEVQTGGFSKESIRPKRNSDKLIARKKDWDPKKYGGFLWPTVAYSVLVVAKVEKGKSKKLKSVKELLGITIMERSSFEKNPIDFLEAKGYKEVKKDLIIKLPKYSLFELENGRKRMLASAKQLQKGNELALPSKYVNFLYLASHYEKLKGSPEDNEQKQLFVEQHKHYLDEIIEQISEFSKRVILADANLDKVLSAYNKHRDKPIREQAENIIHLFTLTRLGAPRAFKYFDTTIDPKQYRSTKEVLDATLIHQSITGLYETRIDLSQLGGD

SEQ ID NO: 145 - protein, 1057 aa, synthetic construct
  REGION 1..1057: note = Description of Artificial Sequence: Synthetic polypeptide
MNQKFILGLDIGITSVGYGLIDYETKNIIDAGVRLFPEANVENNEGRRSKRGSRRLKRRRIHRLERVKLLLTEYDLINKEQIPTSNNPYQIRVKGLSEILSKDELAIALLHLAKRRGIHNVDVAADKEETASDSLSTKDQINKNAKFLESRYVCELQKERLENEGHVRGVENRFLTKDIVREAKKIIDTQMQYYPEIDETFKEKYISLVETRREYFEGPGQGSPFGWNGDLKKWYEMLMGHCTYFPQELRSVKYAYSADLFNALNDLNNLIIQRDNSEKLEYHEKYHIIENVFKQKKKPTLKQIAKEIGVNPEDIKGYRITKSGTPEFTSFKLFHDLKKVVKDHAILDDIDLLNQIAEILTIYQDKDSIVAELGQLEYLMSEADKQSISELTGYTGTHSLSLKCMNMIIDELWHSSMNQMEVFTYLNMRPKKYELKGYQRIPTDMIDDAILSPVVKRTFIQSINVINKVIEKYGIPEDIIIELARENNSDDRKKFINNLQKKNEATRKRINEIIGQTGNQNAKRIVEKIRLHDQQEGKCLYSLESIPLEDLLNNPNHYEVDHIIPRSVSFDNSYHNKVLVKQSENSKKSNLTPYQYFNSGKSKLSYNQFKQHILNLSKSQDRISKKKKEYLLEERDINKFEVQKEFINRNLVDTRYATRELTNYLKAYFSANNMNVKVKTINGSFTDYLRKVWKFKKERNHGYKHHAEDALIIANADFLFKENKKLKAVNSVLEKPEIETKQLDIQVDSEDNYSEMFIIPKQVQDIKDFRNFKYSHRVDKKPNRQLINDTLYSTRKKDNSTYIVQTIKDIYAKDNTTLKKQFDKSPEKFLMYQHDPRTFEKLEVIMKQYANEKNPLAKYHEETGEYLTKYSKKNNGPIVKSLKYIGNKLGSHLDVTHQFKSSTKKLVKLSIKNYRFDVYLTEKGYKFVTIAYLNVFKKDNYYYIPKDKYQELKEKKKIKDTDQFIASFYKNDLIKLNGDLYKIIGVNSDDRNIIELDYYDIKYKDYCEINNIKGEPRIKKTIGKKTESIEKFTTDVLGNLYLHSTEKAPQLIFKRGL

SEQ ID NO: 146 - protein, 1057 aa, synthetic construct
  REGION 1..1057: note = Description of Artificial Sequence: Synthetic polypeptide
MNQKFILGLDIGITSVGYGLIDYETKNIIDAGVRLFPEANVENNEGRRSKRGSRRLKRRRIHRLERVKLLLTEYDLINKEQIPTSNNPYQIRVKGLSEILSKDELAIALLHLAKRRGIHNVDVAADKEETASDSLSTKDQINKNAKFLESRYVCELQKERLENEGHVRGVENRFLTKDIVREAKKIIDTQMQYYPEIDETFKEKYISLVETRREYFEGPGQGSPFGWNGDLKKWYEMLMGHCTYFPQELRSVKYAYSADLFNALNDLNNLIIQRDNSEKLEYHEKYHIIENVFKQKKKPTLKQIAKEIGVNPEDIKGYRITKSGTPEFTSFKLFHDLKKVVKDHAILDDIDLLNQIAEILTIYQDKDSIVAELGQLEYLMSEADKQSISELTGYTGTHSLSLKCMNMIIDELWHSSMNQMEVFTYLNMRPKKYELKGYQRIPTDMIDDAILSPVVKRTFIQSINVINKVIEKYGIPEDIIIELARENNSDDRKKFINNLQKKNEATRKRINEIIGQTGNQNAKRIVEKIRLHDQQEGKCLYSLESIPLEDLLNNPNHYEVDHIIPRSVSFDNSYHNKVLVKQSENSKKSNLTPYQYFNSGKSKLSYNQFKQHILNLSKSQDRISKKKKEYLLEERDINKFEVQKEFINRNLVDTRYATRELTSYLKAYFSANNMDVKVKTINGSFTNHLRKVWRFDKYRNHGYKHHAEDALIIANADFLFKENKKLQNTNKILEKPTIENNTKKVTVEKEEDYNNVFETPKLVEDIKQYRDYKFSHRVDKKPNRQLINDTLYSTRMKDEHDYIVQTITDIYGKDNTNLKKQFNKNPEKFLMYQNDPKTFEKLSIIMKQYSDEKNPLAKYYEETGEYLTKYSKKNNGPIVKKIKLLGNKVGNHLDVTNKYENSTKKLVKLSIKNYRFDVYLTEKGYKFVTIAYLNVFKKDNYYYIPKDKYQELKEKKKIKDTDQFIASFYKNDLIKLNGDLYKIIGVNSDDRNIIELDYYDIKYKDYCEINNIKGEPRIKKTIGKKTESIEKFTTDVLGNLYLHSTEKAPQLIFKRGL

SEQ ID NO: 147-197 - skipped (51 entries)

SEQ ID NO: 198 - protein, 325 aa, Phormidesmis priestleyi
SSGSRCEDWKRVRNLQRLLLKSYSNVLLAVRRVTQINAGKNTPGIDKMLVKTGPAKGKLVDLLKPQNAWQPLAARRVQIPKRNGKRRPLGIPSIIDRCLQAVVKAALEPCWEAQFEPTSYGFRPSRSVHDAIARLYVTANVNNRKKWVLEADIAGCFDTIDHDFLLQQIGHFPARRVIAQWLKAGYVENGIFHPSEAGTPQGGILSPLLANIALHGMETALGITRYAQGCVKRTVKRVLVRYADDCVVVCDSQVEAEQAQVDLQRFLKFRGLELSEEKTRIVHLSEGFDFLSFNVRHYRSQNTRTGWKLLIKPAKSGGSKRTADG

SEQ ID NO: 199 - protein, 324 aa, Turneriella parva
SSGSSGTPESKQSQPGGRKPPLMCHPAITYDAMCSLAGLQRAQISLIEELKRRGEGSKHALSYEDLTELGALLRSHQYSHRPCRLMTIKVGSKKRDIDSPDWLDRIVQRTYVDTIYPLVQQMACDSSHAYLYKRSIHTALWRLIMNIEHFGYSHVFRTDIESFFDSIPHAEMERVIDLHIRDIELNAFSHELLRVAEGFKNSKVGLPTGWLIPPLWANMLLTPVDARLESAGLKFFRYGDDYGILQRSKQEAEFAQGLLESALKPLGLHLKPGYSHKTYTRKLEDGLIVLGHEIRRINNRLTVAISKNSLAETRSGGSKRTADG

SEQ ID NO: 200 - protein, 274 aa, unidentified
  REGION 1..274: note = Description of Unknown: Alteromonadaceae bacterium sequence
SSGSDEVSVTDRSLEQAFNAVFHDRESFNDFCTLPLAPEVSEIPLHLRKVYRPSDKLKTYLRFIDKVVLRHLKYNASVVHSYIKGSSALTAVQAHAKNQAFFLSDIKSFFPNIGDQDVRKVLMRDSHRIPILDFDQHIERVTKLMTLDGVLPVGFPTSPKLSNGFLHEFDNALAAYCDSTGLTYTRYSDDIIISGMDRAKLTVLREKVQMMLEEHASKSLRLNDEKTRVTHRGNKVKILGLVITPDGQVTIDVSRKHALEGLLHSGGSKRTADG

SEQ ID NO: 201 - protein, 269 aa, Enterococcus faecium
SSGSLRNFGLPVISSLEDFASSTRLSVSFIKYYLFQTDSHYKVFSIPKKKGGERIIAQPSRNLKAIQSWILRNILDRLSSSENSKGFEKGDSILNNALPHSGASYILSIDIEDFFPSISANKVHSVFRSLGYNSDVCKILTTFCTYKGRLPQGAPTSPKLANLVSQQLDARIQGYAGPKGIIYTRYADDLTLSSNTVKKLEKARDIIGLISKSEGLKINSLKTKLTGSRSRKSVTGLIVTKEGVGIGRAKYRELRSHIYSGGSKRTADG

SEQ ID NO: 202 - protein, 358 aa, Paeniclostridium sordellii
SSGSEIPLIYSNRKLYEYIKNNKDDFLQCDIHKESDSILTIPFTYLVRKNENEYRRLSLLHPIAQLQVANTLMKYDNLLLNYFNSNSTFSIRTPVGINDSYLNIENRHKLELEWIEKERAKDFSDEENEFVSNYFVIKKFKTITEFYKSDYVKNLELKYKNLIRIDYANCFENIYTHSLEWAYVGNKNIIKNNLHDERFSAKLDILAQRINYNETNGLVVGPEISRTLAEVVLARIDKNVYFDLKEKNIIYKRDYEVVRFIDDIMIFYNAENIGDYIKESIENYSREFKLKINSSKTKYEKRPFFREHMWISHSKKSIRSFLKYYDGSINYSGYTYDRFIEEFKELICSGGSKRTADG

SEQ ID NO: 203 - protein, 323 aa, Staphylococcus aureus
SSGSKLNKSILESYLQWYPFSKLTENSKCTILSEKFFFNFIKNGAIFKEYNTFNFPSHYSQKTSASFRNMTLVSPFVYLYIEVVGYHISKKYTRKSKYVRCYYSGDLSENEFSYKNSYDKFFADINALSSTYDNFYKFDISNFFDAVDINLLFKLINEGEEILDTRSSLIYKRLLQQIGGNKFPTLENSSTLSYLATYIYLDKVDYELEKVLQKNSKIESFQIIRYVDDLYIFFNTMESELNLVSSEIKNVVIDAYRKVKLNLNENKTKLGKSSEVNETLSVALYNHYVYKEEIDIAHFYDKNKILLFLDDLYSGGSKRTADG

SEQ ID NO: 204 - protein, 282 aa, Halomicronema hongdechloris
SSGSSRAAGIDGITVDLFTGIAREQIHQLYRQMRQERYVARPAKGFYLAKQKGGHRLIGIPTVRDRIVQRYLLQSIYPSLENAFSDAVFAYRPGLSIYAAVKRVMERYRYQPTWVIKADIQQFFDQLSWPLLLHQLDQLSLPATWVQWIEQQLKAGIVVSGQFYQPGQGVLPGSILSGALANLYLNDFDRHCLEADIPLVRYGDDCVAVCQSYLEASRSLALMQDWIEGLSLSFHPEKTTIIPPGQAFVFLGHRFRNGTVEGPARQKAEGRRSGGSKRTADG

SEQ ID NO: 205 - protein, 300 aa, unidentified
  REGION 1..300: note = Description of Unknown: Candidatus Omnitrophica sequence
SSGSVWESYKKVRANKGSSGVDGVSLQQFEEKLSDNLYKVWNRLSSGSYFPPAVKEVEIPKKDGGKRLLGIPTVGDRVAQMVVKDYLEPRLEKEFLNQSYGYLKSDKKISELSGKRRLEIEGEARISRAMCHFRLLECYGQFFDLNSEYGVVIKMSASREIEAIKRSTVKQTYDSILVDLNFGIANAPVVSPHDKFSQTLAKAHKAKVLLYMGEYADAASVALDAMGDANYKLEDTYQEIFAKGYKAREVLFSPYMVYEEKSNTWTYAGFYCPVAQIETMADNEKADEVDSGGSKRTADG

SEQ ID NO: 206 - protein, 325 aa, Fischerella sp.
SSGSATYDNFLLAWQRTVNTTSRMIRDELGMKIFAHNLQTNLEYLVQQVKAKDFPYKPLADHKVYVPKPSTTLRTMSLMAVSDVIIYQALVNIIADKAYSYLVTHENQCVLGNIYSGPGKRWMLRPWKKQYTRFVDCIENLYHAGNPWIASTDIVAFYDTIDHARLLSLIRKYCGDDQQFQELLQECLAKWAVHNSNITMGRGIPQGSNASDFLANLFLYEIDKEMIVNGYHYIRYVDDVRILASDKSTVQRGLILFDLELKRAGLVAQVTKTSVHEIEDIETEISRLRFIITAPTRNGNCLLVTLPSLPKSEQASGGSKRTADG

SEQ ID NO: 207 - protein, 308 aa, unidentified
  REGION 1..308: note = Description of Unknown: Lachnospiraceae bacterium sequence
SSGSSGLLPLLGKREVWDEFLSYKAEKQHLSRKDARYWTKFVEEEQYRSVTDHILEPDFSLSVPVKLSVNKSNTGKKRVVYSFPEQESMVLKLLGHLLSRYDACLSPACYSFRKNITAKDAVSHILAVPGLSRKYVLKMDIRNYFNSMPVSSLLHVLKEILSDDPFLYSFLERMLTANEAYEHGRLITEERGAMAGTPTSAFFADVYLLSLDNYFAERGIPYFRYSDDILILADSPKELLSYREIAAKLIEEKGLSLNPDKLSVTPPGGAFEFLGFSIRGTDCPEKGMPAGKVDLSEASGGSKRTADG

SEQ ID NO: 208 - protein, 336 aa, Legionella sainthelensi
SSGSRCMQRITKLYNKLLRSNRIFEQDQAGINISDIYTDKKNITKILIRELLNGSYKPMQYDERKVYINSKMRLIANYSFIDRLLLSILYDLFRERTLNLISPSVYSYISGRSAKQAIQSFCSYLKQIQAPNKQINLYVLRADITNYGGSIPADTHAIFWNYFYDILEEIKDLEQRDCLRIVIEEALRPILHTEDNLPYQKIVGIPVGSPLATLIYNLYLSELDEALSDIPYGFYARYSDDFIYANTDVNQFKEGERRITAILEKLRLRCNPSKNQRFYLTHAGKPSIDSEHFIGSNRIELCGLIIFSDGTRTLKRSIIQKMLERISGGSKRTADG

SEQ ID NO: 209 - protein, 355 aa, Marinomonas mediterranea
QYQLQDAYGYCSYPRPQAAKSLLEKSLSDASLHQACQTMYPRQANFDSSDTDEEHHDAIDELLTKLYVSRERIFKREFTPSQLHSVEIEKPEGGTRLLSVPNWHDRTLQKAVTECLGNTLEHIWMKHSYGYRKGHSRLQARDQINQYIQQGYEWVLESDIESFFDSVNWLNLEQRLKLLLPNEPLVPLLMQWVSAAKQTEDEQTLARHNGLPQGAPISPILANLLLDDLDQDMIAKGHQIVRYADDFVLLFKSKAAAESALDDIITALKEHHLAINLEKTRIVEASQGFRYLGYLFVDGYAIETKREYRKEHAQLDKQLNASSLENEPSLQQEPAVQNEQSTLIGEREKLGTLKL

SEQ ID NO: 210 - protein, 392 aa, Chlorobium limicola
GWLYNQMAMPETIFQAWYKVASNDGRPGWDNKSIEDYSLQLEENLKALSQALLTGTYKQGPLMKLVLLKPDGKDRVLLIPGVMDRVAQTAAAIVLSPIIEAELGNCTFAYRPGISREGAAREIDRLHREGYQWVLDADIRSFFDNVRHDLLFQRLVELIDDKEMISLLHRWLTAEIVDGINPRIQNTMGLPQGCPISPALANLYLDRFDETMEKEGFKLVRFADDYLVLCKTRPKAEAALKLSETALAELKLELHSDKTRITTFAEGFKYLGYLFIRALVIPTKMHPEEWYDKLGKFKLRKKSEHALPSDPDAMTGETAKFELETDQGEKIELTKNELLQTEFGCKLLESLDKKQLSVDEFLEKVARQDEERQKEKRDALKKLYSPFLNTKL

SEQ ID NO: 211 - protein, 401 aa, Chryseobacterium jejuense
SSGSKWKTLKKKRRYITNYQKIDSIKNNADSLFETIRYYKEKHPNELFIINLNKFVKDIQDSILNTNFCFTSPKIIPLSKKDQSKCRPIALYNLKDRIIISLTNKYLSEYFDEHFFPESHAFRPKRIYKGKKVVTSHHHAMDSILKYKSDYKGKKLYVSECDISKFYDSVNHTIVKECFKKLISQSNLVIDSNAKRIFYKYLESYSFVHNVKIYNHKKYSDYWQQYKIDNGYFGWIDDDLKDLKYYKSVNHNRVGVPQGGAISGLIANMVLHFADLELLKKKDSKLHYVRFCDDMVIIHPNKKQCEDYYQVYNESLKKLKLVPHLPLNFNFNNKQILKEFWSEDTKSKSPYRWSGSFRNSTKWIGFVGYEVSFNNEIRVRKRSLKKEKLKQSGGSKRTADG

SEQ ID NO: 212 - protein, 346 aa, Streptococcus agalactiae
SSGSKILQVVDNVERIYREGAGDKATQMIFSDIGTPKSKEEGFDVYNELKDLLVDRGIPKEQIAFVHDANTDEKKNSLSRKVNSGEVRILMASTEKGGTGLNVQSRMKAVHHLDVPWRPSDIVQRNGRLIRQGNMHQEVDIYHYITKGSFDNYLWQTQENKLKYITQIMTSKDPVRSAEDIDEQTMTASDFKALATGNPYLKLKMELENELTVLENQKRAFNRSKDEYRHTVSYCEKHLPIMEKRLSQYDKDIAQSLATKSQDFVMRFDNQAMNNRAEAGDYLRKLITYNRSDTKEVKTLASFRGFDLKMTTRGPSEPLPETVSLMIVGDNQYTVASGGSKRTADG

SEQ ID NO: 213 - protein, 324 aa, Vibrio cidicii
SSGSMSKLKRLRSASTKPQLARVLEVDAAFLTRCLYINKTQNQYHQFSIAKKSGGTRLINAPSKELKSLQKKLSILLLDCIDEINAEKYPRSQLVKPKLRKNGDPDYAAEVLKIKISTAETKQPSLAHGFVKERSILTNAMMHVGKKNVLNIDLNDFFDCFNFGRVRGFFIKNENFKLDQHIATVIAQISCFDNKLPQGSPCSPVITNLITHSLDIRLASLAKKHKCTYTRYADDITFSTRLSEFPAQIMWHDSTTYRAGKALRKEISRSGFSINNSKTRIQYKDSRQNVTGLVVNKKPNIKQEYWRLVRAKCNSGGSKRTADG

SEQ ID NO: 214 - protein, 273 aa, Oryza sativa
AEFRTKLIELLKEFRDCFAWEYYEMPGLSRSIVEHRLPIKPGVRPHQQPPRRRKADMLEPVKAEIKRLYDAGYNQIFMAEEDIHKTAFRCPGAIGLFEWVVMTFGLKSAGAMYQRAMNYIYHDSIGWLVEVYIDDVVVKSKEIGDHIANLRKFLRFLVHERGIEVTQRSVNAIKKIQPPENKTKLQEMIGKINFVRRFISNLLGRLRHYLLSNECTVICKADVVKYMLSAPILKGRVGKWIFSLTESDLRYESPKAIKGQAVADFIVEHHDDS

SEQ ID NO: 215 - protein, 297 aa, unidentified
  REGION 1..297: note = Description of Unknown: Lachnospiraceae bacterium sequence
SSGSIEMSIDHIVQKRGAPGYDKMQPEELPAYWAKHGERIKETIQNGSYVPRPISIHYIPKADKTKKRKLGIPCIIDRMILYAIQSVMTPYFEEEFSDRSYAFRKGKGCHDALFACLLELNRGAEYVVDLDIKSFFDKVNHTLLFELLDKKIEDPYLLLLLKKYIRTKAVCGKTFYINRIGLPQGTAISPILANMFLNSFDKHLEKMEIRFVRYADDIVIFCHNKEDAHYLLSDAESYLRYKLKLRLNQEKTKIVRPWELEYLGYSFSAASNGNMFFSLGEKTKQHMSGGSKRTADG

SEQ ID NO: 216 - protein, 212 aa, Tribolium castaneum
KYLVEVQDEVKPRGVLNIIPKQDNFRAIVSIFPDSARKPFFKLLTSKIYKVLEEKYKTSGSLYTCWSEFTQKTQGQIYGIKVDIRDAYGNVKIPVLCKLIQSIPTHLLDSEKKNFIVDHISNQFVAFRRKIYKWNHGLLQGDPLSGCLCELYMAFMDRLYFSNLDKDAFIHRTVDDYFFCSPHPHKVYDFELLIKGVYQVNPTKTRTNLPTH

SEQ ID NO: 217 - protein, 422 aa, Rosa chinensis
EFRTKLIELLKEFRDCFAWQYYEMPGLSRSIVEHRLPTEPGVRPHQQPPRRCKADMLEPVKAEIKCLYDASFIRRCRYAEWVSSIVPVIKKNGKERVCIDFRDLNKATPKDEYPMPVADQLVDAASGYKILSFMDGNVGYNQIFMAEEDIHKTAFRCPSAIGLFEWVVMTFGLKSAGATYQRAMNYIYHDLISWLVEVYIDDVVVKSKEIEDHIADLRKVFERTRKYGLKMNPTKCAFGVSAGQFLGFLVHERGIEITQRSINVIKMIKPPEDKTELQEMIGKINFVRRFISNLSGRLEPFTPLLRLKADQQSTWGAEQQKALDNIKEYLSSPPVLIPPQKGIPFWLYLSAGDKSIGSVFIQKLEGKERADVVKYMLSAPILKGRIGKWIFSLTEFDLWYESQKAIKGQAIANFIVDHRDDS

SEQ ID NO: 218 - protein, 451 aa, Brassica napus
VAVSDIRVVQEFQDVFQSLQGLPPSQSDPFTIELEPGTAPLSKAPYRMAPAEMAELKKQLKDLLGKGFIRPSTSPWGAPVLFVKKKDGSFRLCIDYRELNRVTVKNRYPLPRIDELLDQLRGATCFSKIDLTSGYHQIPIAEADVRKTAFRTRYGHFEFVVMPFGLTNAPAVFMRLMNSVFQEFLDEFVIIFIDDILVYSKSPEEQEVHLRRVMEKLREQKLFAKLSKCSFWQREMGFLGHIVSAEGVSVDPEKIEAIRDWPRPTNATEIRSFLGWAGYYRRFVKGFASMAQPMTKLTGKDVPFVWSQECEEGFVSLKEMLTSTPVLALPEHGQPYMVYTDASRVGLGCVLMQHGKVIAYASRQLMKHEGNYPTHDLEMAAVIFALKIWRSYLYGGKVQVFTDHKSLKYIFTQPELNLRQRRWMELVADYDLEIAYHPGKANVVVDALSRK

SEQ ID NO: 219 - protein, 631 aa, Staphylococcus aureus
RKLENTLESETELKRTLDKLYSKTKEHMEKKTRIKHTSLLEIAMSKPNIVTAIHSLKSNKGSMTPGVDGKTIQDYLRLSEEKLIELIRGRLTNFKAHLIKRVFIPKANGGQRPLGIPTIEDRIIQQMMKQVLEPVLEAQFFKYSFGFRPERTTYHALERVKVLVHNTGYHWIVEGDIRQFFDKVNHRILIKKLWSMGIKDRRILCLITEFLKAGIFKNIIRNDNGTPQGGILSPLLANVYLHSFDKWVAKQFEEFTTRHEYSKHDHKLRGLKSSNLKPGYLIRYADDWVLVTNNKSHAYRWKTVIKNFLQKELKLELSEEKTRITNIRHKPIEFLGFKYKVVLKGVKGKKKKDKKTRYISQITPSDKKIKRKVKELRATLTSLGKRLSHDKLSNAQLILAYNSKVRGLINYYSYATESPIMDREGYKLRKKTFNLLSRRGGVLHPINKCINLADKYPKRTQKTLAIKTEVGYIGIMHLNLTKMNENLYKQKVQNETPYSPSGRKLIERRKGTKEFSVRLDEITSLSLLEKVRKKLVNSPRYNFEYFMNRGYAFNRDRGKCRITGVPLGKHNLHVHHINPNLPLEEVNKLPNLACVDKEIHKAIHNEVDMSSILNNKEINKLKRFRNKIHAI

SEQ ID NO: 220 - protein, 329 aa, Schizosaccharomyces pombe
SSGSKLEYKKVRKLNKLLINSFYNWVVQIHQVAPEGKDNSRGDGKTLRIWNKGRVLNTKELVEWRTRAIEVWRRNQSYQPKKLKRIYIPKPDGTERPLSIPTWFDQIIQAIIGNVVECQVESIIEANDLKAYGFRKGFKTADAIQGLQGYALTGKKQKLVEFDRSKFYETIPDDKLLAVLENVDRYTRNNIEKMLKNESLDLKGIVTKPEMGTPQGGNISPILANLYASTQIMLPFKKESQSKLTMYADDGIIICDNKENPEMALAKLEAIAEKAGLKLKKDKTKIIDGDRFNFLGYEITRGKGIRLQKDMIKKCQKDGSGGSKRTADG

SEQ ID NO: 221 - protein, 277 aa, Medicago truncatula
SSGSFGIDIENATFKIVVINDKNNLSGTKKRRVIHMPSPEMRIIHKRLIRWIRGQKRLVPISASGSRPGDSVFKSVFIHKKTRKHSYVSNGYTHIDTIGWFPRHFFCLDIKDAFPSVSVSKMTEALLFAGLDPNDYSYNKVISILERYCFTKEDGLIVGANASPDLFNIYAEYFLDRNLRRYCHEHSLVYTRYLDDLIFSSNKTIGKRKRKSIYKFIDESGLKVNEKKTKIYDLRKGCAVINGIGVNEKGRMFIPRQYLDTLRGYMNSGGSKRTADG

SEQ ID NO: 222 - protein, 321 aa, unidentified
  REGION 1..321: note = Description of Unknown: Elusimicrobia bacterium sequence
SSGSFSANHCTAEDVANLFNYLNSHGEGNVEREMLLKVIAEPEERKVLQEVKCLIDRYYPKRKKNPLEGIPKIKQFVTRFRNKERHYRSFAIPKRNGGRRIIEAPTQELANIQRLILKKILYRNQIWNSNSSVHGFVPGRNILSNASLHKEATVIVRIDLKDAFRNTKEEMLVKHLKEYFTEKGAKILVRLCTYKGHLPQGAPSSGMLLNFVLGELDGKLKKIAGFMGWRYSRYADDLTFSCVEFNKHTVGIGKLIERVKSMIKDYSYRVNEEKIRVFKKNRAMRVTGLVLNSGKPTISRKFRRNVRAKVHSGGSKRTADG

SEQ ID NO: 223 - protein, 376 aa, Schizosaccharomyces pombe
FEVELTQENYRLPIRNYPLPPGKMQAMNDEINQGLKSGIIRESKAINACPVMFVPKKEGTLRMVVDYKPLNKYVKPNIYPLPLIEQLLAKIQGSTIFTKLDLKSAYHLIRVRKGDEHKLAFRCPRGVFEYLVMPYGISTAPAHFQYFINTILGEAKESHVVCYMDDILIHSKSESEHVKHVKDVLQKLKNANLIINQAKCEFHQSQVKFIGYHISEKGFTPCQENIDKVLQWKQPKNRKELRQFLGSVNYLRKFIPKTSQLTHPLNKLLKKDVRWKWTPTQTQAIENIKQCLVSPPVLRHFDFSKKILLETDASDVAVGAVLSQKHDDDKYYPVGYYSAKMSKAQLNYSVSDKEMLAIIKSLKHWRHYLESTIEPF

SEQ ID NO: 224 - protein, 497 aa, Medicago truncatula
ELVEHRLPIKPGFRPYKQPPRHFNPLLYDRVKEEIDRLLKAGFIRPCRYAEWVSSIVSVEKKGSGKIRVCIDFRDLNKATPKDEYPMPIADMMINDASGHKNAGATYQRAMNLIFHDLLGIILEIYIDDIVVKSDGMEGHIADLRLAFERMRQYGLKMNPLKCAFGVSAGRFLGFMVHERGVEIYPKKIEKIRDFKAPICKKEVQKLLGMVNYLRRFIFNLAGKIDAFVPILHLKKEADFTWGAKQQEAFEELKRYLSTPPVVRAPKAGKPIRLYIASEDKVIGAVLTQEEDGKVYIITYLSRHLLDAETRPILSGRIGKWAYALIKYDLAYEPLKSMRGQIACDFIVDHHVDIAYEEDVCLVEVIPWKIYFDGSSCKEGQGIGVVLFSPNGMCYEASVRLEYYCTNNQAEYNALLFDLQVMEMVGAKYVEAFGDSELVVQQVAEVYKCLDGSLNRYLDSCLDIIANFDNFAIRHIARHDNSRANDLAQQASGYDVK

SEQ ID NO: 225 - protein, 312 aa, Oryza sativa
SEFRTKLIELLKEYRDCFAWEYYEMPGLSRSVVEHRLPIKPGIRPYQQPPRRCKADMLEVVKAEVKHLYDAGFIHPCRYAEWVSNIVPVIKKNGKVRVYIDDEVVISKEIEDHIADLRKVFERTRKYGLKMNPTKCAFGKLEPFTPLLRLKADQKFTWGAEQQKALDNIKKYLSSPPVLIPPQKGISFRLYLSAGDKSIGSVLIQELERKERAIFYLSRRLLDAETRYSPVEKLCLCLYFSCTKLRHYLLSNECTVICKADVVKYMLSAPILKGRVGKWIFALTEFDLRYESPKTIKGQAIADFIMDHRDDS

SEQ ID NO: 226 - protein, 504 aa, Sinorhizobium meliloti
DTDHRTDKVWVLGIQRKLYQWSKANPDDQWRDMWGWLTDLRVLRHAWQRVASNKGGRTAGVDGMTVGRIRNRSEHRFLVDLQADLRSGAYRPSPARRKLIPKAGKPGQFRPLGIPTIRDRVVQGAAKILLEPIFEAQFWHVSYGFRPGRNTHGALEYIRRAALPQKRDEDTRRNRLPYPWVIEGDIKGCFDNINHHHLLERMRKRIGDRRVVRLVGLFLKAGVLTEDQFLRTDAGTPQGGIISPLLANIALSAIEERYERWTYHRKKTQARRKSNGVAAAASARDSDRIAGRCVYLPVRYADDFVVLVSGSLEEAMAEKSALADYLIKTTGLTLLPEKTKVTAMTEGFEFLGFRFSVHWDKRYGYGPRVEIPKAKAANLRHKVKQLTQRDSISVSLGEKLRGVNAITSGWANYYRYCVGAGRVFVALDWYIGLRLYCWLHKKRPKATPSELWGSKQPSRRRATRRVWREGSVEQHVLGWTPVDRYRLAWMDMPDFAMSSGEPDA

SEQ ID NO: 227 - protein, 356 aa, Gallus gallus
SPVLAELKEQGIVIPTHSPFNSPVWPVRKPNGKWRLTIDYRRLNANTGPLTAAVPNISELIAAIQEQAHPFMATIDVKDMFFMVPLHPDDQLRFAFTWEGQQYTFTRLPQGFKHSPTLAHYALAKELEQIPLEEGVRLYQYIDDILIGGDHLTPVKIMHDKIIKRLEELGLTIPPDKIQSPAAEVKFLGIWWKGGMACIPQDTLSALDQLKMPENKKELQHALGLLVFWRKHIPDFSIIARPLYDLLRKGVSWGWTPVHEEALQLLIFEAITHQSLGPIHPSDPVQIEWGFAHSGLSIHLWQKGPEGPIRPIGFYSRSFKDAEKRYSQLEKGLFVVSLALREAERTIRQQPIILRG

SEQ ID NO: 228 - protein, 300 aa, unidentified
  REGION 1..300: note = Description of Unknown: Candidatus Magneto ovumchiemensis sequence
SSGSNVRSIMPLSKGKSLLHRTFTTANLDSSLKTLPNSSPGPDTITTDDLKKAGDQFLDKLKNNIVNGNYKQGKTKQYRIPKNDDTFRYIYVLNTTDRLVHKTIADYISPIVDNIISNSAYAYRRGLNTKGAANALNNALKEGYTSGIKADISEFFDSINISALSMMIDSLFPFEPLADFINGILENNTRDGIKGILQGSPLSPLLSNLYLTRFDSDMESKGFFKLIRYADDFVLLLKTASSYEETIKHVEDSLSTLGLKLKPEKTTEITQGKAINFLGYVITDETIAKPSGGSKRTADG

SEQ ID NO: 229 - protein, 427 aa, Desulfotomaculum copahuensis
QPLLQFPEGKVRNFQRKLYVKAKQEKTFRFYSLYDKLYREDVLQYAWQQCRANKGAPGADGQSFKDIEEKVGVERFLKEIAEELRNGTYRPMPVRRVYILKPDGSQRPLGIPTIKDRIAQMACLTVIQPIFEADFLDCSYGFRPKRNAHQAIGAITENIKQGFTAVYDADLTKCFDSIQHRLIMDSLAERITDGKVLRLIKGWLEAPIVEPGGPKQGRKNYQGTPQGGVISPLLANIVLNRLDRLWHRPGGPRERYNARLVRYADDFVVLARFIGEPIKNELESIITSMGLNLNEKKTRILDLNKGDILNFLGYSIRISRDKNRRITIKPSDKAIARLRDKIREIISRERLYHGLKGIIAEINPVLRGWKQYFKLTNVSRIFSGLNFYITARFYRVGRKTSQRYSKIFKPGVYVTLRKMGLYCLATD

SEQ ID NO: 230 - protein, 339 aa, Pseudomonas aeruginosa
WFADEPRHTRGGSRMADLYRQVRLMKTLSSAWRVVRASCMQSSSSEIRNEAIEFEADSFRQLKSIQSKLQKKKFEFLPQHGIAKKRPGKSSRPLVIAPIPNRIVQRAILDVLQDNVAYVQEILKVETSFGGIKGKNVALAIAAINKAFSNGVTHYVRSDIPSFFTKVQRAKVVDALAKNIDDVDMVNLFSAAIETTLGNLTDLQRRGLESIFPLSHDGVAQGSPLSPLIANIYLAEFDREMNREGLACIRYIDDFVIMAASEKQVMKGFRAAKAVLRRQGLQVYSPDDDPLKASKGDVRDGFDFLGCYVKPGLVQPSKFARNRLLEKIDSGGSKRTADG

SEQ ID NO: 231 - protein, 267 aa, Halomicronema hongdechloris
RAAGIDGITVDLFTGIAREQIHQLYRQMRQERYVARPAKGFYLAKQKGGHRLIGIPTVRDRIVQRYLLQSIYPSLENAFSDAVFAYRPGLSIYAAVKRVMERYRYQPTWVIKADIQQFFDQLSWPLLLHQLDQLSLPATWVQWIEQQLKAGIVVSGQFYQPGQGVLPGSILSGALANLYLNDFDRHCLEADIPLVRYGDDCVAVCQSYLEASRSLALMQDWIEGLSLSFHPEKTTIIPPGQAFVFLGHRFRNGTVEGPARQKAEGRR

SEQ ID NO: 232 - protein, 426 aa, Dorea formicigenerans
DTSNLMEQILSSDNLNRAYLQVVRNKGAEGVDGMKYTELKEHLAKNGETIKGQLRTRKYKPQPARRVEIPKPDGGVRNLGVPTVTDRFIQQAIAQVLTPIYEEQFHDHSYGFRPNRCAQQAILTALNIMNDGNDWIVDIDLEKFFDTVNHDKLMTLIGRTIKDGDVISIVRKYLVSGIMIDDEYEDSIVGTPQGGNLSPLLANIMLNELDKEMEKRGLNFVRYADDCIIMVGSEMSANRVMRNISRFIEEKLGLKVNMTKSKVDRPSGLKYLGFGFYFDPRAHQFKAKPHAKSVAKFKKRMKELTCRSWGVSNSYKVEKLNQLIRGWINYFKIGSMKTLCKELDSRIRYRLRMCIWKQWKTPQNQEKNLVKLGIDRNTARRVAYTGKRIAYVCNKGAVNVAISNKRLASFGLISMLDYYIEKCVTC

SEQ ID NO: 233 - protein, 321 aa, Catenovulum agarivorans
SSGSQLRVEIRGRRSQPIISSWVSLLESTLFTVSPSTTQLSPTHKSLSYPNYNFIDHIDADLSPHMTVRHILAADLGISVQLISRILANKTQYYRSFEIIRKNGNKRLIEAPRTYLKVLMRYINHHLLTGLAIHDSVHSYRQGKSFLTNAQIHVAKQYVFNLDIENYFGCINKRQVRELFSINDFTASAATLLSELCTFNDRLPQGAPTSPIISNAILFKIDQSMHRYCEKNNLCYTRYSDDITLSGNSRQSIVKAKSRLIAMIHGAGFKINDKKTRLMPYHKQQLVTGVVVNKEATPARNELRRIRAKFHSGGSKRTADG

SEQ ID NO: 234 - protein, 419 aa, Geobacillus sp.
ALLERILARDNLITALKRVEANQGAPGIDGVSTDQLRDYIRAHWSTIHAQLLAGTYRPAPVRRVEIPKPGGGTRQLGIPTVVDRLIQQAILQELTPIFDPDFSSSSFGFRPGRNAHDAVRQAQGYIQEGYRYVVDMDLEKFFDRVNHDILMSRVARKVKDKRVLKLIRAYLQAGVMIEGVKVQTEEGTPQGGPLSPLLANILLDDLDKELEKRGLKFCRYADDCNIYVKSLRAGQRVKQSIQRFLEKTLKLKVNEEKSAVDRPWKRAFLGFSFTPERKARIRLAPRSIQRLKQRIRQLTNPNWSISMPERIHRVNQYVMGWIGYFRLVETPSVLQTIEGWIRRRLRLCQWLQWKRVRTRIRELRALGLKETAVMEIANTRKGAWRTTKTPQLHQALGKTYWTAQGLKSLTQRYFELRQG

SEQ ID NO: 235 - protein, 338 aa, Nostoc sp.
FTQEHLHFAWLQVCAGSKTAGVDGISVELFESMATEQLQNLVYQLNNETYTASPAKGFYIPKKNGDKRLVGIPTVRDRIIQRLLLDELYFPLEGTFLDCSYAYRPGHNILQAVQHLYGYYQYQPKWIIKADVADFFDNLSWALLLTFLEKLSLEPSVLQLIEQQLQSGMIIAGQYRNFGKGVLQGGILSGALANLYLTNFDKKCLSQGINLVRYGDDFVIACNSWQEANRILDKITVWLGEVYLTLQSEKTQIFTPNDEFTFLGYRFAGGEVYAPPPPKPVLKGEWVINDSGNPYFRTKPRPKKPVSHPPKACSIDKPINFPRASLSHYWQETMTTKL

SEQ ID NO: 236 - protein, 468 aa, Alicyclobacillus macrosporangiidus
TSSRKEQGQQKTLSRGSLQEEVVNTQGTVRAQSSYPAQVRSDTCGTEYTLLDEMLKLDNMMAALKRVEQNKGAAGVDEVDVKSLRPYLKEHWFRIREELLEGTYKPQPVRRVEIPKSDGGVRLLGIPTLVDRLIQQGLAQVLTPIFDPNFSNSSYGFRPNRSTHQAVKQAKQYIEDGYRHVVDLDLEKFFDRVNHDILMARVTRKVKDKRVLKLIRAYLNAGVMANGVCVRSEQGVPQGGPLSPILSNIILDDLDKELERRGHRFVRYADDCNIYVKTVRAGQRVMEGVKRFVEDELKLKVNEQKSAVDRPWKRKFLGFSFTPERKTRTRIAPKARAKFEDKVRELTSRSRSMSMAKRIDQLNVYLRGWMGYFRLADTRSVIESLDQWTRRRLRMCYLKQWKKPKSVYRNLVKLGLSADFARRISGSGKGYWRLSNTPQMNKALGLAFWANQGLLSLVHLYDKHRSVS

SEQ ID NO: 237 - protein, 418 aa, Lysinibacillus sphaericus
LNQILARPNMIQALKRVEANKGRHGVDMMPVQTLRQHILENWESIKAQILTGTYEPQPVRRVEIPKPDGGVRLLGIPTVTDRLIQQAISQILSKEYDQTFSDNSYGFRPNRSAHDAVRKAKGYMKEGYRWVVDMDLEKFFDKVNHDRLMATLAKRIHDKSLLKLIRKYLQAGVMINGVVSSTEEGTPQGGPLSPLLSNIVLDELDKELEKRGHKFVRYADDCNIYVKSKRAGDRTIASVQRFVEGKLRLKMNESKSAVDRPWNRKFLGFSFSHHKEPKVRVAKTSLQRMKKKIREITSRKKPVPMEHRIEKLNQYLIGWCGYFALADTPSIFSRLDGWIKRRLRMCLWKNWKKPRTRVRNLIRLKVPYGKAYEWGNTRKGYWRISKSPILHRTLGNSYWGSQGLKSLQSRYESLRYSS

SEQ ID NO: 238 - protein, 417 aa, Ammonifex degensii
WEQVWERENLLAALKRVERNGGAPGIDGMTVEELRPYLREHWLEIRETLDQQSYQPSPVRRVEIDKPEGGVRLLGIPTVLDRFLQQAMAQVLTPLFEPQFSPASYGFRPGRSAHEAVKQAQEYVQAGYEWVVDIDLERYFDQVNHDMLMARVARVVADKRVLKEIRAYLKSGVMVNGVVQDTGEGTPQGGPLSPLLSNIMLDDLDKELEKRGHKFVRYADDCNVYVRTQRAGERVMESVKAYLEKKLKLKVNPKKSKVERATRVKFLGFSFYERNGEVRVRVASQSVARFRKKLRGLTKRTRSGKLEEVIETINGYLMGWMAYYRLADTPSVFAGLDSWIRRRLRQMIWKRWKRGKTRYRELVKLGVPRGRAALGAVGKSPWHMSKTPVVNEALSNAYLRNSGLKSLKARYQELRVA

SEQ ID NO: 239 - protein, 417 aa, Alkalihalobacillus halodurans
MERILSRENLIQALERVEKNKGSYGVDEMDVKSLRLHLHENWTSIRNEIIEGSYFPKPVRRVEIPKPNGGVRKLGIPTVMDRFLQQAIAQILTQLYDPTFSERSFGFRPHRRGHNAVRQAKQWMKEGYRWVVDIDLEKFFDKVNHDRLMRKLSSRIQDPRVLQLIRRYLQTGVMERGLVSPNTEGTPQGGPLSPLLSNIVLDELDNELEKRGLKFVRYADDCNIYVRSKRAGLRIMESVTSFIENRLKLKVNREKSAVDRPWNRKFLGFSFTRGKDPKMRVSKESVKRLKQRIRELTSRRHSMKMSDRLRRLNRYLTGWLGYYQVVDTPSILAQIDAWIRRRLRMIRWKEWKTTSARQKNLVRLGIKKAKAWQWANSRKGYWRVAHSPIMDYALNSEYWKGQGLMSLAERYQTRRWT

SEQ ID NO: 240 - protein, 418 aa, Virgibacillus dakarensis
LERILSRENLIQALTRVEGNKGSHGVDEMPVQNLRAHILEHWTTIRGQLEKGTYYPQPVRRVEIPKPNGGKRKLGIPTVMDRFLQQAIAQVLTDIYDPTFSQHSYGFRPKRRGHDAVREARNYIKQGYRWVVDMDLEKFFDKVNHDRLMRTLSQRINDSRVLKLIRRYLQAGVMEDGIVRPNTEGAPQGGPLSPLLSNIVLDELDKELEKRGLHFVRYADDCNIYVRSKRAGLRVMKSITKFIEGKLKLKVNEQKSAVDRPWKRKFLGFSFTVHKEKPKIRVSKESVQRFKQRIRELTSRRKSMNMKDRIEKLNRYLVGWLGYYQLADTPSIFKGLDSWIRRRLRMIRWKEWKKVKTKYKNLMKQGINKGKAWEWANTRKAYWRIANSPILHKALGDRYWSNQGLKSLYYRYQTLRWT

SEQ ID NO: 241 - protein, 432 aa, Aeribacillus pallidus
AQIEEFVHVERISMLMEMILSRENLLAALKRVEQNKGSHGVDGMSVKDLRRHLYENWDSIRQSLREGTYKPLPVRRVEIPKPNGGVRLLGIPTVTDRFIQQAIAQVLTKIFDPTFSNHSYGFRPGRRGHDAVREAKGYIKEGYRWVVDIDLEKFFDKVNHDKLMGILAKTIKDQILLKVIRRYLQSGVMINGVVMETDMGTPQGGPLSPLLSNIMLHELDKELEKRGHKFVRYADDCNIYVKTKKAGIRVMNSITNFIEKELKLKVNKEKSAVDRPWKRKFLGFSFTLNKTPKVRIANESVKRLKNKIREITSRSKPYPMEKRIEKLNKYLMGWCGYFALAETPSKFKELDEWIRRRLRMCLWKEWKTPKTRIRKLRGLGVPSHKAFEWGNTRKKYWRIACSPILHKTLDNSYWKRRGLRSLFERYQALRHT

SEQ ID NO: 242 - protein, 418 aa, Cytobacillus firmus
LMDLILSRENLIAALKRVERNKGSHGIDGMSVKSLRRHLYENWDSLCDSLRKGTYQPNPVRRIEIPKPNGGVRLLGIPTVTDRFIQQAIAQILTPLFDPSFSEHSYGFRPNRRGHDAVRKAREYISEGYRWVIDMDLEKFFDKVNHDKLMGILASRIQDRLVLKLIRKYLQAGIMINGVVYDAEEGTPQGGPLSPLLSNILLDKLDKELERRGHKFVRYADDCNIYMKSKKAGERVMNSITRFIEQKLKLKVNRGKSAVDRPWKRKFLGFSFTLNKKPKVRIANESIKRLKTKIREFTSRSKSIPMEVRIEKLNQYLTGWCGYFALADTPSKFKEFDEWIRRRLRMIEWKQWKNPRTRVRKLKGLGVPDQKAYEWGNSRRKYWRIASSPILHKTLDNSYWSNRGLKSLYQRYEFLRQT

SEQ ID NO: 243 - protein, 462 aa, Paenibacillus algicola
RSHEGQRQQKISRESLRQREAVKPSGYAGAPSSSSAQIDPSSREANNDLLERMLRGDNLRLAYKRVVQNGGAPGVDNVTVANLQAYLKTHWEAVKTELLAGTYRPMPVKRVEIPKPGGGVRLLGIPTVMDRFLQQALLQVMTPIFDADFSRHSYGFRPGKRAHDAVKQAQRYMQEGFRWVVDMDLAKFFDRVNHDMLMARVARKVTDKCVLKLIRAYLNAGVMANGVTEKTGEGTPQGGPLSPLLANILLDDLDKELTERGLRFVRYADDCNIFVASKRAGERVMDSVTRFVEGKLKLKVNREKSAVDRPWNRKFLGFSFLRDKKATIRLAPQTISRFKEKVRELTNRTRSMSMENRIAQLNRYLMGWIGYFRLASAKGHCEKFDQWIRRRLRMCLWKQWKRVRTRIRELRALGVPEWACFVMANSRRGAWEMSRNTNNALPTSYWEAKGLKSLLSRYLELC

SEQ ID NO: 244 - protein, 467 aa, Gelria sp.
SSNELHRKQKTHSRASLREIAVNTQRTAKGQSISSAQTRISPCKDQGNNLMEKVVERSNMMAALRRVEQNKGAAGIDGVKTDELRNLLWDIWTDTKEQLLTGTYRPKPVRRVEIPKPNGGVRLLGIPTVLDRLIQQALLQILTSIFDPTFSEASYGFRPGKRAHTAVRVARSYVESGYDWVIDMDIEKFFDRVNHDILMARVARKVKDKRVLKLIRRYLQAGVMLGGVVVRTEEGTPQGGPLSPLLANIYLDDLDKELEKRGHKFVRYADDCNIYVKSQRAAERVMQSIREFLQKRLKLKVNEEKSCVDRPWNLKYLGFSMFKSKGKVRICLAPETIKRVKNKIREFTSRSKPIRMEDRIRRLNAYLGGWLGYFALADTSNDFASIDGWLRRRLRMCLWRQWDRVRTRLRELRALGLPEWVAHQLANTRKGPWRMSHRPLHSALNNAYWEKQGLLSLAKRHQAICQA

SEQ ID NO: 245 - protein, 438 aa, Rhizoctonia solani
SPANRAVIDEQMDKWMKLDVIEPSKSPWAAPVFIVYRNAKPRMVIDLRKLNESVVPDEHPIPRQEEILQSLQGCKYLSSLDALAGFTQLSIHEDDREKLAFRTHRGLFQFKRMPFGYRNGPAVFQRVMQNVLSPYLWLFTLVYIDDIVIYSKTFDEHLAHVDLVLKAIMESKLTLSPDKCHFGYGSILLLGQKVSRLGLSTHKEKVQSILDLETPKNVKTLQTFLGMMVYFSSYIPFYSWIAHPLFQLLKKGTKWEWKAEHQNAFELCKEVLTEAPVRAHAMPGRPYRVYSDACDFGLAAILQQVQPVEIRDLRGTRTYDRLRKAFDKGEKVPVLAQTISKDVKDVPEDVWASDFESTTVHIERVIAYWSRVLQSAERNYSPTEREALALKEGLVKFQVYLEGEKVLAITDHAALQWSRTFQNVNRRLLSWGLVFSAF

SEQ ID NO: 246 - protein, 333 aa, Thermoanaerobacterium sp.
SSGSSYFYKERRGKIYESYYGSIVTYNTTTSKMADSKELFSSFFKARMSLKKEFPYDEIAIKLFEYNLEDNINRFSKEILKGYKFNTDFIGYKVPKNEKDDRQKVMDNIFNTIAGASFLDIIGIVIDREFSSNCCGNRLNKKLNTEYSYEYFWYGWYYKFMKKAFNKVLNKNNYYLKLDIKSFYTNINQNILYDKIIKLIPYKDSRLKEFINSLIKRHIPYVNNGKGLPQGSLTSGFLANLYLDDFDKYFISKTNDGYMRYVDDIFIFGKTEEQIKELGKEAENKLKDLYLEINKEKTSMGDKSSLKNIYYDDKELDDFQKRLSGGSKRTADG

SEQ ID NO: 247 - protein, 262 aa, Desulforapulum autotrophicum
SSGSLRINSLKHLAHRLGFAPEVLQKAASRAEKSYKFDKIPKKSGKGFREISKPNALLKNIQKAIHKLLTEIEISDNAHCGIKKRSNVTNAMNHCNKEWVYSMDFKNFFPNISHHQVYGLFRYELKCSPDVTSILTRLCTVKGGVPQGGSMSMDIANLVSRKLDTRLEGLCKIHNLSYTRHCDDLNFSGKRILDTFRAKVEIIIKESGFPLNPDKETLIPHHHPQSVVGLRVNRKKPCVPRKTRREWRKEKHSGGSKRTADG

SEQ ID NO: 248 - protein, 298 aa, Citromicrobium sp.
IPNVVWKECVELLAPQLERIFKAVYEKGMYSERWKEWTTVVLKKPGKPRYDTPKAWRPIALMNTMGKILTALLTEDLKYVTEKYSLLPNTHFGGRPGRTTTDAIQLLTSWIKGHWRKGNVVSVLFLDIEGAFPNVVVSRLAHNMRRRRVPEFIVKLIEHQLRDRRTKLKFDDYESEWVPIDNGSGQGDPKSMLEYLFYNADLIDLVAGLGEELEEGENGEDAPRGSARERGTEKRDENAAAFVDDAWLGGAGATFEEANETLKDMMNRRGGAMEWSKKHNSKFEISKLVYMGFTRRMR

SEQ ID NO: 249 - protein, 319 aa, Escherichia coli
KSAEYLNTFRLRNLGLPVMNNLHDMSKATRISVETLRLLIYTADFRYRIYTVEKKGPEKRMRTIYQPSRELKALQGWVLRNILDKLSSSPFSIGFEKHQSILNNATPHIGANFILNIDLEDFFPSLTANKVFGVFHSLGYNRLISSVLTKICCYKNLLPQGAPSSPKLANLICSKLDYRIQGYAGSRGLIYTRYADDLTLSAQSMKKVVKARDFLFSIIPSEGLVINSKKTCISGPRSQRKVTGLVISQEKVGIGREKYKEIRAKIHHIFCGKSSEIEHVRGWLSFILSVDSKSHRRLIAYISKLEKKYGKNPLNKAKT

SEQ ID NO: 250 - protein, 298 aa, Granulicella mallensis
ITPLVSFTSFAQFEQALRDSRVSAHSGASFSNSLEVDRLVKSARELYGRGLPPIVSSRTFSLLFGVSPRLISAMTKSPEKYWRTFEIKKRSGKGRNIAAPRVFLKTVQRFLLRFVLEKIPIHPNAFGFAPGKGIFKHAERHLKARFVLTLDIADFFPSISWTQVRDIFANIGFPDGVPSLLADLCTRNKVFPQGAPTSPYLSNLIFLKTDEALTEAANQFEMRYSRYADDLTFSCDSQPSDEARLAFEQIIRDAGFRIQHSKTRLRGPSQAREVTGLLVNEKIQPSRHTRRLLRAKFH

SEQ ID NO: 251 - protein, 691 aa, Arvicanthis niloticus
SLQLEEEYRLYQEREKPPEELQEWLLRFPQAWAETGGTGMARQAPPVVIELKSGATPIGVRQYPMSKEAREGIRPHIKRLLEQGILVPCRSPWNTPLLPVKKPGTNDYRPVQDLREVNKRVQDVHPTVPNPYNLLSTLPPTRTWYTVLDLKDAFFCLRLHPNSQPLFAFEWRDPESGRTGQLTWTRLPQGFKNSPTLFDEALHRDLAPFRANNPQVTLIIYIDDILLATETREDCELGTQKILAELGELGYRVSAKKAQLCRTEVTYLGYTLKNGQRWLTEARKRTVTQIPTPTTPRQVREFLGTAGFCRLWIPGFATLAAPLYPLTKEKGKFIWTKEHQVAFETLKKTLLQAPALALPDLSKPFTLYIDERKGVARGVLTQALGPWKRPVAYLSKKLDPVASGWPSCLRAIAATATLIKDADKLTLGQKVTVVAPHALENIIRQPPDRWITNARITHYQSLLLTERVTFAPPAVLNPATLLPEADETPVHQCEEILAEEAGTWSDLTDQPWPGAETWFTNGSSFVKKGKRRAGAAVVDRRTVIWASSLPEGTSAQKAELIALIQALKLAEGKSVNIYTDSRYAFATAHVHGAIYRQRGLLTSAGRDIKNKKEILDLLVAIHLPRKVAIIHCPGHQKGTGPIEKGNQMADQMAKEAAHGPMTLIAKVGSRQDERALEKRALTEEEGLEYLT

SEQ ID NO: 252 - protein, 673 aa, Gibbon ape leukemia virus
VLNLEEEYRLHEKPVPSSIDPSWLQLFPTVWAERAGMGLANQVPPVVVELRSGASPVAVRQYPMSKEAREGIRPHIQRFLDLGVLVPCQSPWNTPLLPVKKPGTNDYRPVQDLREINKRVQDIHPTVPNPYNLLSSLPPSHTWYSVLDLKDAFFCLKLHPNSQPLFAFEWRDPEKGNTGQLTWTRLPQGFKNSPTLFDEALHRDLAPFRALNPQVVLLQYVDDLLVAAPTYRDCKEGTQKLLQELSKLGYRVSAKKAQLCQKEVTYLGYLLKEGKRWLTPARKATVMKIPPPTTPRQVREFLGTAGFCRLWIPGFASLAAPLYPLTKESIPFIWTEEHQKAFDRIKEALLSAPALALPDLTKPFTLYVDERAGVARGVLTQTLGPWRRPVAYLSKKLDPVASGWPTCLKAVAAVALLLKDADKLTLGQNVTVIASHSLESIVRQPPDRWMTNARMTHYQSLLLNERVSFAPPAVLNPATLLPVESEATPVHRCSEILAEETGTRRDLKDQPLPGVPAWYTDGSSFIAEGKRRAGAAIVDGKRTVWASSLPEGTSAQKAELVALTQALRLAEGKDINIYTDSRYAFATAHIHGAIYKQRGLLTSAGKDIKNKEEILALLEAIHLPKRVAIIHCPGHQKGNDPVATGNRRADEAAKQAALSTRVLAETTKPQELI

SEQ ID NO: 253 - protein, 725 aa, Peromyscus leucopus
ALSLEEEYRLFEAEPPEKSPEELQNWLREFPQAWAETAGLGLARDQPPLMISLKASATPVSIRQYPMSREAHEGIKPHIRRLLDQGVLKPCQSPWNTPLLPVKKPGTGDYRPVQDLREVNKRVEDIHPTVPNPYNLLSTLPPTHVWYTVLDLKDAFFCLRLHPQSQLLFAFEWRDPEKGSSGQLTWTRLPQGFKNSPTLFDEALHADLAGFRVEHPTLTLLQYMDDLLLVARSRTECMEGTRALLARLGQKGYRASAKKAQVCRDKVTYLGYTLSRGQRWLTGARKETIISIPPPRNPRQVREFLGTAGYCRLWIPGFAKLAAPLYPLTKPGTMFQWEEKHQKAFQQIKKALLEAPALGLPDLTKPFELFVDENSGFAKGVLVQRLGPWRRPVAYLSKKLDPVATGWPPCLRMVAAIAVLLKDAGKLTLGQPLTVLASHAVEALVRQPPDRWLSNARMTYYQALLLDSDRVNFGPIVSLNPATLLPLPSPSEEHDCLQILAEAHGTRPDLTDQPLKDPDAVWYTDGSSFLEEGERRAGAAITTESEVVWASSLPPGTSAQRAELIALTQALRMAEGKKLTVYTDSRYAFATAHVHGEIYRRRGLLTSAGKEIKNKKEILDLLKALFLPLQLSIVHCPGHQKDDSAVARGNRLADLTARTVASQPAGSSQLMAIQEPQPERDPVPYSPEDHELAKKMGSDWEQRRQAYILGDRMVMSTSHTRYMLR

SEQ ID NO: 254 - protein, 604 aa, Nannospalax galili
TLKLEDEYKLHDDPRPTPENIDQWLAKYPEAWAETNGMGLAKQQPPLVISLKASVTPANVKQYPMTIEAQQGIRPHIKRLLEQGILIPCQSAWNTPLLPVKKPGGTDYRPVQDLREVNKRVEDIHPTVPNPYNLLSTLPPSHAWYTVLDLKDAFFCLKLHPSSQPLFAFEWKDPELGLSGQLTWTRLPQGFKNSPTLFDGALHQDLAAFRTQYPHLIILQYVDDILLAAETKEECLEGTGALLQELGQLGYRASAKKAQLCKKEVTYLGYQLKEGQRWLTKARQQTILSIPAPKDRKQVREFLGTAGFCRLWIPGFAEMAAPLYPLTKASEGFTWENEHQRAFENIKQALLTAPALGLPDLNKPFELYVDEKTGYAKGVLTQKLGPWRRPVAYLSKKLDPVASGWPPCLRMVAALAVLVKDAFKLTLGQPLCIRAPHALESLIRQPPDRWLSNTRMTHYQALLLDTDRIQFGSPVALNPATLLPSTEEPDHHDCLQILAEVFGTRPDLKDQPLDNADYTWYTDGSSFLKGSQRRAGAAVTSKDKVIWAKPLPEGTSAQKAELIALTQALRLAEGKSLNVYTDSRYAFATAHIHGEIYRRRGLDL

SEQ ID NO: 255 - protein, 680 aa, Vombatus ursinus
TCPLSEESRLLPLTFSPDRPSTTSTPTSLTLLNHFKGLVPGVWAETNPFGLAGHQPPVVVQLSSTATPACVQQYPLTRAALLGIKPHIDRLLAAGILRPCQSSWNTPLLPVRKPGSGDFRPVQDLREVNARVETVHPTVPNPYTLLSSLDPARTWYTVLDLKDAFFSIPLAPVSQPIFAFTWTDPNTGTSSQLTWTRLPQGFKNSPTLFGSALASDLAAFRVSYPEVTLLQYVDDLLLATSSEAICKDATLHLLQLLEASGYRISGKKAQLCSQSVVYLGFTLRSGQRLLSRGRVAAILGMPAPRNRRGLREFLGMAGYCRLWILGFAEVAKPLYEALTGEPTQFVWGPRQQEAFDKLRKALSSTPALSLPDLSKPFRLYVSESRAVAKGVLTQPLGPWNRPVAYLSKQLDPVASGWPSCLRTVAAIAVLVREAAKLTFGQPLEISASHHLEQLLHSPPTRWISNSRLTHYQSLLLDSARISFAPPVTLNPATLLPDSPPSSPIHDCLDTLDSIHTSRPGLTDVPLTNPDLVLFTDGSSFVQEGIRRAGAAVVTPVETLWDTALPPGTSAQRAELIALTQALRLSAGRRVNIYTDSRYAFATVHIHGYVYLQRGLLTSAGREIRNKSQIQDLLDAVWLPKEVAVIHVPAHTRGTDPQSLGNAAADKAARAAACKPLIPAM

SEQ ID NO: 256 - protein, 679 aa, Reticuloendotheliosis virus
TAPLEEEYRLFLEAPIQNVTLLEQWKREIPKVWAEINPPGLASTQAPIHVQLLSTALPVRVRQYPITLEARRSLRETIRKFRAAGILRPVHSPWNTPLLPVRKPGTSEYRMVQDLREVNKRVETIHPTVPNPYTLLSLLPPDRTWYSVLDLKDAFFCIPLAPKSQLIFAFEWTDAEEGESGQLTWTRLPQGFKNSPTLFDEALNRDLQGFRLDHPSVSLLQYVDDLLIAADTQAACLSATRDLLMTLAELGYRVSGKKAQLCQEEVTYLGFKIHKGSRTLSNSRTQAILQIPVPKTKRQVREFLGTIGYCRLWIPGFAELAQPLYAATRGGNDPLEWGEKEEEAFQSLKLALTQPPALALPSLDKPFQLFIEETGGAAKGVLTQALGPWKRPVAYLSKRLDPVAAGWPRCLRAIAAAALLTREASKLTFGQDIEITSSHNLESLLRSPPDRWLTNARITQYQVLLLDPPRVRFKQTAALNPATLLPETDDTLPIHHCLDTLDSLTSTRPDLTDQPLAQAEATLFTDGSSYIPHGKRYAGAAVVTLDSVIWAEPLPIGTSAQKAELIALTKALEWSKDKSVNIYTDSRYAFATLHVHGMIYKERGLLTAGGKAIKNAPEILALLTAVWLPKRVAVMHCRGHQKDDAPTSAGNRRADEVAREVAIRPLSIQATVFDAPDMP

SEQ ID NO: 257 - protein, 665 aa, Walleye dermal sarcoma virus
TVLLPPTYHKQLSCQTKNTLNIDEYLLQFPDQLWASLPTDIGRMLVPPITIKIKDNASLPSIRQYPLPKDKTEGLRPLISSLENQGILIKCHSPCNTPIFPIKKAGRDEYRMIHDLRAINNIVAPLTAVVASPTTVLSNLAPSLHWFTVIDLSNAFFSVPIHKDSQYLFAFTFEGHQYTWTVLPQGFIHSPTLFSQALYQSLHKIKFKISSEICIYMDDVLIASKDRDTNLKDTAVMLQHLASEGHKVSKKKLQLCQQEVVYLGQLLTPEGRKILPDRKVTVSQFQQPTTIRQIRAFLGLVGYCRHWIPEFSIHSKFLEKQLKKDTAEPFQLDDQQVEAFNKLKHAITTAPVLVVPDPAKPFQLYTSHSEHASIAVLTQKHAGRTRPIAFLSSKFDAIESGLPPCLKACASIHRSLTQADSFILGAPLIIYTTHAICTLLQRDRSQLVTASRFSKWEADLLRPELTFVACSAVSPAHLYMQSCENNIPPHDCVLLTHTISRPRPDLSDLPIPDPDMTLFSDGSYTTGRGGAAVVMHRPVTDDFIIIHQQPGGASAQTAELLALAAACHLATDKTVNIYTDSRYAYGVVHDFGHLWMHRGFVTSAGTPIKNHKEIEYLLKQIMKPKQVSVIKIEAHTKGVSMEVRGNAAADEAAKNAVFLVQRVLK

SEQ ID NO: 258 - protein, 671 aa, African green monkey simian foamy virus
TTLVPLQEYEERLLKQTMLTGSYKEKLQSLFLKYDALWQHWENQVGHRRIKPHHIATGTVNPRPQKQYPINPKAKASIQTVINDLLKQGVLIQQNSIMNTPVYPVPKPDGKWRMVLDYREVNKTIPLIAAQNQHSAGILSSIFRGKYKTTLDLSNGFWAHSITPESYWLTAFTWLGQQYCWTRLPQGFLNSPALFTADVVDLLKEVPNVQVYVDDIYISHDDPREHLEQLEKVFSLLLNAGYVVSLKKSEIAQHEVEFLGFNITKEGRGLTETFKQKLLNITPPRDLKQLQSILGLLNFARNFIPNFSELVKPLYNIIATANGKYITWTTDNSQQLQNIISMLNSAENLEERNPEVRLIMKVNTSPSAGYIRFYNEFAKRPIMYLNYVYTKAEVKFTNTEKLLTTIHKGLIKALDLGMGQEILVYSPIVSMTKIQKTPLPERKALPIRWITWMSYLEDPRIQFHYDKTLPELQQVPTVTDDIIAKIKHPSEFSMVFYTDGSAIKHPNVNKSHNAGMGIAQVQFKPEFTVINTWSIPLGDHTAQLAEVAAVEFACKKALKIDGPVLIVTDSFYVAESVNKELPYWQSNGFFNNKKKPLKHVSKWKSIADCIQLKPDIIIIHEKGHQPTASTFHTEGNNLADKLATQGSYVVNINTTPSLDAELDQLLQGQYP

SEQ ID NO: 259 - protein, 671 aa, Guenon simian foamy virus
TTLVPLQEYQERLLKQTALPEREKKILHSLFLKYDALWQHWENQVGHRRIKPHHIATGTVNPRPQKQYPINPKAKPSIQIVINDLLKQGVLIQQNSVMNTPVYPVPKPDGKWRMVLDYREVNKTIPLIAAQNQHSAGILSSIVREKYKTTLDLSNGFWAHSITPESYWLTAFTWQGKQYCWTRLPQGFLNSPALFTADVVDLLKEVPNVQAYVDDIYISHNDPKEHLEQLEKVFSLLLNAGYVVSLKKSEIAQYEVEFLGFNITKEGRGLTDTFKQKLLNITPPKDLKQLQSILGLLNFARNFIPNFSELVKPLYNIIAIANGKFIQWTEENSQQLQYIISVLNSAENLEERNPEVKLIMKVNTSPSAGYIRFYNESAKRPIMYLNYVYTKAEIKFTNTEKLLTTIHKGLIKALDLAMGQGILVYSPIVSMTKIQRTPLPERKALPIRWITWMSYLEDPRIQFHYDKTLPELQNVPMVTGDEVAKTKHPSEFSMVFYTDGSAIKHPNINKSHSAGMGIAQVQFKPEFTVLNTWSIPLGDHTAQLAEVAAVEFACKKALKINGPVLIVTDSFYVAESANKELPYWQSNGFLNNKKKPLRHISKWKSIAECIQLKPDISIIHEKGHQPTATTFHTEGNTLADKLATQGSYVVNSNTTPSLDAELDQLLQGRYP

SEQ ID NO: 260 - protein, 671 aa, Rhesus macaque simian foamy virus
TVLVPLQDYQERLLKQTTLPKEQKDQLEKLFLKYDALWQHWENQVGHRRIKPHNIATGTLAPRPQKQYPINPKAKPSIQIVIDDLLKQGVLIQQNSTMNTPVYPVPKPDGKWRMVLDYREVNKTIPLIAAQNQHSAGILSSIYRGKYKTTLDLTNGFWAHPITPESYWLTAFTWQGKQYCWTRLPQGFLNSPALFTADVVDLLKEVPNVQAYVDDIYMSHDDPQEHLEQLEKVFSILLNAGYVVSLKKSEIAQREVEFLGFNITKEGRGLTETFKQKLLNVIPPKDLKQLQSILGLLNFARNFIPNYSELVKPLYTIVANANGKFISWTEENSNQLQYIISVLNQADNLEERNPETRLILKVNSSPSAGYIRYYNEGSKRPIMYVNYVFSKAEVKFTQTEKMLTTMHKGLIKAMDLAMGQEILVYSPIVSMTKIQKTPLPERKALPVRWITWMTYLEDPRIQFHYDKTLPELQQTPSVTEDVIAKTKHPSEFAMVFYTDGSAIKHPDINKSHSAGMGIAQVQFQPEYKVIHQWSIPLGDHTAQLAEIAAVEFACKKALKISGPVLIVTDSFYVAESANKELSYWKSNGFLNNKKKPLKHVSKWKSIAECLQLKPDITIIHEKGHQQPMTTLHTEGNNLADKLATQGSYVVHCNTTPSLDAELDQLLQGHNP

SEQ ID NO: 261 - protein, 671 aa, Japanese macaque simian foamy virus
TVLVPLHEYQERLLQQTALPKEQKELLQKLFLKYDALWQHWENQVGHRRIKPHNIATGTLAPRPQKQYPINPKAKPSIQIVIDDLLKQGVLIQQNSTMNTPVYPVPKPDGKWRMVLDYREVNKTIPLIAAQNQHSAGILSSIYRGKYKTTLDLTNGFWAHPITPESYWLTAFTWQGKQYCWTRLPQGFLNSPALFTADVVDLLKEIPNVQAYVDDIYISHDDPQEHLEQLEKIFSILLNAGYVVSLKKSEIAQREVEFLGFNITKEGRGLTDTFKQKLLNITPPKDLKQLQSILGLLNFARNFIPNYSELVKPLYTIVANANGKFISWTEDNSNQLQHIISVLNQADNLEERNPETRLIIKVNSSPSAGYIRYYNEGSKRPIMYVNYIFSKAEAKFTQTEKLLTTMHKGLIKAMDLAMGQEILVYSPIVSMTKIQRTPLPERKALPVRWITWMTYLEDPRIQFHYDKSLPELQQIPNVTEDVIAKTKHPSEFAMVFYTDGSAIKHPDVNKSHSAGMGIAQVQFIPEYKIVHQWSIPLGDHTAQLAEIAAVEFACKKALKISGPVLIVTDSFYVAESANKELPYWKSNGFLNNKKKPLRHVSKWKSIAECLQLKPDIIIMHEKGHQQPMTTLHTEGNNLADKLATQGSYVVHCNTTPSLDAELDQLLQGHYP

SEQ ID NO: 262 - protein, 671 aa, Eastern chimpanzee simian foamy virus
TVLVPLQEYQERLLKHTALPKEQVKQLEKLFLKFDALWQHWENQVGHRRIKPHNIATGILTPRPQKQYPINPKAKPSIQIVIDDLLKQGVLIQQNSIMNTPVYPVPKPDGKWRMVLDYREVNKTIPLIAAQNQHSAGILSSIYRGKYKTTLDLTNGFWAHPITPESYWLTAFTWQGKQYCWTRLPQGFLNSPALFTADVVDLLKEVQNVQAYVDDIYISHDDPQEHVEQLEKVFSILLNAGYVVSLKKSEIAQREVEFLGFNITKEGRGLTDTFKQKLLNITPPKDLKQLQSILGLLNFARNFIPNYSELVKPLYTIVANANGKFITWSEENSNQLQRIISVLNQAENLEERNPETRLIIKINSSPSAGYIRYYNEGSKRPIMYVNYVFSKAEMKFTHTEKLLTTMHKGLIKAMDLAMGQEILVYSPIVSMTKIQKTPLPERKALPVRWITWMTYLEDPRIQFHYDKSLPELQQIPNVTEDVIAKTKHPSEFSMVFYTDGSAIKHPDVNKSHSAGMGIAQAQFQPEYKVLHQWSIPLGDHTAQLAEIAAVEFACKKALKVSGPVLIVTDSFYVAESANKELSYWKSNGFLNNKKKPLKHVSKWKSIAECLQLKPDIVIIHEKGHQPSMTTLHTEGNNLADKLATQGSYVVHCNTTPSLDAELDQLLQGHNP

SEQ ID NO: 263 - protein, 672 aa, Simian foamy virus
TILVPLQEYQDRILNKTALPEEQKQQLKALFTKYDNLWQHWENQVGHRKIRPHNIATGDYPPRPQKQYPINPKAKPSIQIVIDDLLKQGVLTPQNSTMNTPVYPVPKPDGRWRMVLDYREVNKTIPLTAAQNQHSAGILATIVRQKYKTTLDLANGFWAHPITPDSYWLTAFTWQGKQYCWTRLPQGFLNSPALFTADAVDLLKEVPNVQVYVDDIYLSHDNPHEHIQQLEKVFQILLQAGYVVSLKKSEIGQRTVEFLGFNITKEGRGLTDTFKTKLLNVTPPKDLKQLQSILGLLNFARNFIPNFAELVQTLYNLIASSKGKYIEWTEDNTKQLNKVIEALNTASNLEERLPDQRLVIKVNTSPSAGYVRYYNESGKKPIMYLNYVFSKAELKFSMLEKLLTTMHKALIKAMDLAMGQEILVYSPIVSMTKIQKTPLPERKALPIRWITWMTYLEDPRIQFHYDKTLPELKHIPDVYTSSIPPLKHPSQYEGVFCTDGSAIKSPDPTKSNNAGMGIVHAIYNPEYKILNQWSIPLGHHTAQMAEIAAVEFACKKALKVPGPVLVITDSFYVAESANKELPYWKSNGFVNNKKEPLKHISKWKSIAECLSIKPDITIQHEKGHQPINTSIHTEGNALADKLATQGSYVVNCNTKKPNLDAELDQLLQGNNV

SEQ ID NO: 264 - protein, 671 aa, unidentified
  REGION 1..671: note = Description of Unknown: Simian foamy virus Pongopygmaeus pygmaeus sequence
TVLVPLEQYKERILKETALEGQFKQQLQNILSTFDTLWQHWENQVGHRKIPPHNIATGTHPPRPQKQYPINPKAKESIQIVINDLLKQGVLIQQNSIMNTPVYPVPKPDGRWRMVLDYREVNKTIPLIAAQNQHSAGILASIYRGTYKTTLDLANGFWAHPITPNSYWLTAFTWQGKQHCWTRLPQGFLNSPALFTADVVDLMKHIPNVQVYVDDLYLSHDDPQEHLQVLQQVLHILHDAGYVVSLKKSAIAQKVVEFLGFNITKTGRGLTDAFKEKLLNISPPQNLKQLQSILGLMNFARNFIPNYAERVKPFYSLISTAKSNNILWNDELTSQLQELITLLNQADNLEERKPTTRLIIKVNSSSHAGYIRYYNEGSKKPILYINYVFSKAEEKFSMLEKLLTTLHKALIKAVDLAMGTEIMVYSPIVSMTKIQKTPLPERKALPVRWITWMTYLEDPRITFHYDKTLPELKDVPSVYQNDIPIVPHPSQYSMVFYTDGSAIKNPNPTKTHSAGMGVVQGKFNPEFQVVNQWSIPLGNHTAQLAEVAAVEFACKQALKITGPVLIITDSFYVAESANKELPYWKSNGFVNNKKKPLKHVSKWKSIADCLSLKTGITIKHEKGHQPSHTSVHTEGNALADKLATQGSYVVNNIIKPSLDAELDQVLQGNLP

SEQ ID NO: 265 - protein, 672 aa, Central chimpanzee simian foamy virus
TIRVPIEEYKERIIQQSTLPRDYKDKLRTLLEKYNILWQHWENQVGHRRIFPHNIATGTCKPKPQRQYPINPKARASIQVVIDDLLKQGVLIKQTSVMNTPVYPVPKPDGRWRMVLDYREVNKTIPLIGAQNQHSLGLLTTLVREKYKTTLDLANGFWAHPITPESYWITAFTWQGLQYCWTRLPQGFLNSPALFTADVVDLLKEIPNVQVYVDDLYISHEDPQEHLDVLDKIFQKLKDAGYVVSLKKSEIAQSTVEFLGFNITKEGRGLTESFKTKLLDLKPPETLKQLQSILGLLNFARNFVSNFSELVKPLYQLISTAKGNNISWSNENTKQLQQLISALNNADNLEERKPDVKLIVKLNASPSAGYIRFYNETGKKPIMYINYVFTKAEIKFSPLEKLLVTLHKALIKALDIAMGKEILVYSPIVSMTKIQKTPLPERKALPIRWITWMTYLEDPRISFYYDKTLPELKLVPEVQEKEKIIASRHPSQYTSVFYTDGSAIRSPDVSKAHSAGMGVVQGYFDPEFKISNSWSVPLGDHTAQYAEVCAVEFACKKALSVSGPVLIITDSFYVAESATKELPYWRSNGFLTNKKKPLKHVSKWKVIADCLQSKPDIVILHEKGHQPNNTSIHTEGNALADKLATQGSYTVNNIQNPSLDAELDQILQGNFP

SEQ ID NO: 266 - protein, 672 aa, Yellow-breasted capuchin simian foamy virus
TVKLPVQDFKKELINKANINNEEKKQLAKLLDKYDILWQQWENQVGHRKIPPHNIATGTVAPRPQRQYHINTKAKPSIQQVIDDLLKQGVLVKQTSVMNTPVYPVPKPDGKWRMVLDYRAVNKTIPLIGAQNQHSLGILTNLVRQKYKSTIDLSNGFWAHPITKDSQWITAFTWEGKQHVWTRLPQGFLNSPALFTADVVDLLKDIPGISVYVDDIYFSTETVSEHLKILEKVFKILLEAGYIVSLKKSALLRHEVTFLGFSITQTGRGLTSEFKDKIQNITPPKTLKELQSILGLFNFARNFVPNFSEIIKPLYSLISTAEGNNIKWTSEHTRHLEEIVSALNHAGNLEQRDDESPLVVKLNASPKTGYIRYYNKGGQKPIAYASHVFTNTESKFTPLEKLLVTMHKALIKAIDLALGQPIEVYSPIVSMQKLQKTPLPERKALSTRWITWLSYLEDPRIIFHYDKTLPDLKNVPETITEKQPKILPIIEYAAVFYTDGSAIRSPDKNKSHSSGMGIVQAIFKPELTIEHQWTIPLGDHTAQYAEISAVEFACKKANNISGPVLIVTDSDYVARSVNEELPFWRSNGFVNNKKKPLKHISKWKNISDSLLLKRDITIVHEPGHQPSHTSIHTQGNNLADKLATQGSYNVNSIVKNPSLDAELEQLINGHSM

SEQ ID NO: 267 - protein, 672 aa, Spider monkey simian foamy virus
TIKLPVQDLKNTLVSQANIGKEDKIKLAKLLDKYDDLWQQWDNQVGNRKITPHNIATGTYPPKPQKQYHINPKAKPSIQIVINDLLKQGVLRQSTSPMNTPVYPVPKPDGKWRMVLDYRAVNKTIPLIAAQNQHSLGILTNLIRHKYKSTIDLSNGFWAHPITEDSQWITAFTWEGKQHVWTRLPQGFLNSPALFTADVVDILKEVPGVSVYVDDIYISSPTMEEHFQVLDSIFRKLLETGYIVSLKKSALARYEVNFLGFVISETGRGLTSEFRERLQEITPPTTLKQLQSILGFLNFARNFVPNFSELVQPLYQLISTASGNFIQWTAEHTLRLNELISALNHAGNLEQRRGDSPLVVKVNASDKTGYIRYYNDNSLIPIAYASHVFSTAELKFTPLEKLLVTMHRALLKGIDLALGQPIKVYSPIASMQKLQKTPIPERKALSTRWVTWLSYLEDPRITFYYDKTLPDLKHVPASTDNNIITLLPITEYEAVFYTDGSAIKSPKTEQTHSAGMGIVMVVYTPEPNITQQWSIPLGDHTAQYAEISAVEFACKKASLLQGPVLIVTDSDYVARSANKELPFWRSNGFLNNKKKPLKHISKWKNISDSLLLKRNITIVHEPGHQPSKTSIHTLGNSLADKLAVQGSYSVNTINKIPSLDAELNQILEGNLP

SEQ ID NO: 268 - protein, 670 aa, White-tufted-ear marmoset simian foamy virus
TIKLPVQEQKDSLVSQANIKKEDKIKLAKLLDKYDALWQNWENQVGNRKITPHNIATGTEPPRPQKQYHINPKAKPSIQIVINDLLKQGVLKQVTSPMNTPVYPVPKPDGKWRMVLDYRAVNKTIPLIAAQNQHSLGILTNLVRHKYKSTIDLSNGFWAHPITSDSQWITAFTWEGKQHVWTRLPQGFLNSPALFTADVVDILKEIPNVSVYVDDIYFSSPTVEEHLDTLEKIFDKLLQAGYIVSLKKSALARYEVNFLGFAISETGRGLTSEFKERLQEITPPTTIKQLQSIMGFLNFARNFIPNFSELVQPLYQLIATASGNFIHWTTEHTLRLREIISALNHAGNLEQRVGDSPLVIKVNASDRTGYIRYYNDGSIVPIAYASHVFSSAEQKFTPTEKLLVTMHRALLKGLDLALGQPIRVYSPVASMQKLQKTPLPERKALSTRWVTWLSYLEDPRITFFYDKSLPDIKTFLPQLLLNAYMLPITQYEAVFYTDGSAIKAPKLTQAHSAGMGIVMVIFNPEPTVKQQWSIPLGDHTAQYAEISAVEFACKKASLLTGPVLIVTDSDYVARSANDELPFWRSNGFLNNKKKPLKHISKWKNISDSLLLKRNITIVHEPGHQPSKTSIHTFGNSLADKLAVQGSYTVNTVHTPSLDAELNQILNKDFP

SEQ ID NO: 269 - protein, 676 aa, Feline foamy virus
TIKLDLEEQQGTLLNNSILSKKGKEELKQLFEKYSALWQSWENQVGHRRIRPHKIATGTVKPTPQKQYHINPKAKPDIQIVINDLLKQGVLIQKESTMNTPVYPVPKPNGRWRMVLDYRAVNKVTPLIAVQNQHSYGILGSLFKGRYKTTIDLSNGFWAHPIVPEDYWITAFTWQGKQYCWTVLPQGFLNSPGLFTGDVVDLLQGIPNVEVYVDDVYISHDSEKEHLEYLDILFNRLKEAGYIISLKKSNIANSIVDFLGFQITNEGRGLTDTFKEKLENITAPTTLKQLQSILGLLNFARNFIPDFTELIAPLYALIPKSTKNYVPWQIEHSTTLETLITKLNGAEYLQGRKGDKTLIMKVNASYTTGYIRYYNEGEKKPISYVSIVFSKTELKFTELEKLLTTVHKGLLKALDLSMGQNIHVYSPIVSMQNIQKTPQTAKKALASRWLSWLSYLEDPRIRFFYDPQMPALKDLPAVDTGKDNKKHPSNFQHIFYTDGSAITSPTKEGHLNAGMGIVYFINKDGNLQKQQEWSISLGNHTAQFAEIAAFEFALKKCLPLGGNILVVTDSNYVAKAYNEELDVWASNGFVNNRKKPLKHISKWKSVADLKRLRPDVVVTHEPGHQKLDSSPHAYGNNLADQLATQASFKVHMTKNPKLDIEQIKAIQACQNNERLP

SEQ ID NO: 270 - protein, 671 aa, Guenon simian foamy virus
TTLVPLQEYQERLLKQTALPNKEKTMLQSLFLRYDALWQHWENQVGHRRIKPHHIATGTVPPRPQKQYPINPKAKPSIQVVINDLLKQGVLVQQNSTMNTPIYPVPKPDGKWRMVLDYREVNKTIPLIAAQNQHSAGILSSIFRGKYKTTLDLSNGFWAHPITPESYWLTAFTWQGQQYCWTRLPQGFLNSPALFTADVVDLLKEIPNVQAYVDDIYISHDDPVEHVQQLEKVFSLLLNAGYVVSLKKSEIAKHEVEFLGFNITKEGRGLTDTFKQKLLNITPPKDLKQLQSILGLLNFARNFIANFSELVRPLYNIVSSANGKYITWTQENSQQLQNIISTLNSAKNLQERNPEVRLVMKVNTSPSAGYIRFYNEATKQPIMYLNYVYSKAETKFTMTEKLLTTIHKGLIKALDLAMGQEILVYSPIVSMTKIQKTPLPERKALPIRWITWMSYLEDPRIQFYYDKTLPELLQVPKVTEDEIAKTKHPSEFNMVFYTDGSAIKHPNIKKSHSAGMGIAQVQFKPDFTIVNTWSIPLGDHTAQMAEIAAVEFACKKALKITGPVLVVTDSFYVAESANKELPYWQSNGFVNNKKKPLKHVSKWKSIAECLQLKPDIVIMHEKGHQPSNTTFHTEGNNLADKLATQGSYVVNTNTTPSLDAELDQLLQGHTP

SEQ ID NO: 271 - protein, 438 aa, Enterococcus faecium
IAQKAINIFEKVQVFQRKIYLSTKADNKRKFGVLYDKVYRKDILKVAWFYVKRNKGSAGIDDFTIEEIEAYGVQKFLDEIEDQLRNKKYQPKAVKRVYIPKANGKKRPLGIPTVRDRVVQTAVKIVIEPIFEADFQEFSYGFRPKRSANQAIREIYKYLNYGCEWVIDADLKGYFDTIPHDKLLLLVKERVTDKSIIKLLSLWLEAGIMEDNQVRSNILGTPQGGVISPLLANIYLNALDRYWKNNRLEGRGHDAHLIRYADDFVILCSNNPKKYYQYAKQRIDKLGLTLNEEKTRIVHATEGFDFLGYTLRKSKSHKSGKYKTYYYPSRKSMKSIKGKVKDVIQTGQHLNLPDVMERLNPMLRGWANYFKAGNSKQHFKSIDNYVIYNLTIMLRKKHKKSGKGWREHPPSWYYNYFGLVCLRKLSTNINDDSQRYGR

SEQ ID NO: 272 - protein, 38 aa, synthetic construct
  REGION 1..38: note = Description of Artificial Sequence: Synthetic polypeptide
AEAAKEAAKEAAKEAAKALEAEAAKEAAKEAAKEAAKA

SEQ ID NO: 273 - protein, 76 aa, synthetic construct
  REGION 1..76: note = Description of Artificial Sequence: Synthetic polypeptide
AEAAKEAAKEAAKEAAKALEAEAAKEAAKEAAKEAAKAAEAAKEAAKEAAKEAAKALEAEAAKEAAKEAAKEAAKA

SEQ ID NO: 274 - protein, 63 aa, synthetic construct
  REGION 1..63: note = Description of Artificial Sequence: Synthetic polypeptide
AGGSQYKLILNGKTLKGETTTEAVNAATAEKVFKQYANRNGVDGKWTYDDATKTFTVTEGGSA

SEQ ID NO: 275 - protein, 141 aa, synthetic construct
  REGION 1..141: note = Description of Artificial Sequence: Synthetic polypeptide
KLSGGGGSGGGGSGGGGSAEAWYNLGNAYYKQGDYQKAIEYYQKALELDPNNAEAWYNLGNAYYKQGDYQKAIEYYQKALELDPNNAEAWYNLGNAYYKQGDYQKAIEDYQKALELDPNNLQRSAGGGGSGGGGSGGGGAS

SEQ ID NO: 276 - protein, 63 aa, synthetic construct
  REGION 1..63: note = Description of Artificial Sequence: Synthetic polypeptide
AGGSQYKLILNGKTLKGETTTEAVDAATAEKVFKQYANDNGVDGEWTYDDATKTFTVTEGGSA

SEQ ID NO: 277 - protein, 46 aa, synthetic construct
  REGION 1..46: note = Description of Artificial Sequence: Synthetic polypeptide
AGSGNSSGSGGSGGSGNSSGSGGSPVPSTPPTPSPSTPPTPSPSAS

SEQ ID NO: 278 - protein, 47 aa, synthetic construct
  REGION 1..47: note = Description of Artificial Sequence: Synthetic polypeptide
AGGSSGGSSGGSSGGSSGGSSGGSSGGSSGGSSGGSSGGSSGGSSAS

SEQ ID NO: 279 - protein, 39 aa, synthetic construct
  REGION 1..39: note = Description of Artificial Sequence: Synthetic polypeptide
AGGSSGGSSGGSSGGSSGGSSGGSSGGSSGGSSGGSSAS

SEQ ID NO: 280 - protein, 144 aa, synthetic construct
  REGION 1..144: note = Description of Artificial Sequence: Synthetic polypeptide
AGSGGSGGSGGSPVPSTPPTPSPSTPPTPSPSIQRTPKIQVYSRHPAENGKSNFLNCYVSGFHPSDIEVDLLKNGERIEKVEHSDLSFSKDWSFYLLYYTEFTPTEKDEYACRVNHVTLSQPKIVKWDRDGGSGGSGGSGGSAS

SEQ ID NO: 281 - protein, 152 aa, synthetic construct
  REGION 1..152: note = Description of Artificial Sequence: Synthetic polypeptide
AGSGGSGGSGGSPVPSTPPTPSPSTPPTPSPSIQRTPKIQVYSRHPAENGKSNFLNCYVSGFHPSDIEVDLLKNGERIEKVEHSDLSFSKDWSFYLLYYTEFTPTEKDEYACRVNHVTLSQPKIVKWDRDPVPSTPPTPSPSTPPTPSPSAS

SEQ ID NO: 282 - protein, 74 aa, synthetic construct
  REGION 1..74: note = Description of Artificial Sequence: Synthetic polypeptide
AGSGGSGGSGGSPVPSTPPTNSSSTPPTPSPSPVPSTPPTNSSSTPPTPSPSPVPSTPPTNSSSTPPTPSPSAS

SEQ ID NO: 283 - protein, 66 aa, synthetic construct
  REGION 1..66: note = Description of Artificial Sequence: Synthetic polypeptide
AGSGGSGGSGGSPVPSTPPTPSPSTPPTPSPSGGSGNSSGSGGSPVPSTPPTPSPSTPPTPSPSAS

SEQ ID NO: 284 - protein, 74 aa, synthetic construct
  REGION 1..74: note = Description of Artificial Sequence: Synthetic polypeptide
AGSGGSGGSGGSPVPSTPPTPSPSTPPTPSPSPVPSTPPTNSSSTPPTPSPSPVPSTPPTPSPSTPPTPSPSAS

SEQ ID NO: 285 - protein, 74 aa, synthetic construct
  REGION 1..74: note = Description of Artificial Sequence: Synthetic polypeptide
AGSGGSGGSGGSPVPSTPPTPSPSTPPTPSPSPVPSTPPTPSPSTPPTPSPSPVPSTPPTPSPSTPPTPSPSAS

SEQ ID NO: 286 - protein, 121 aa, synthetic construct
  REGION 1..121: note = Description of Artificial Sequence: Synthetic polypeptide
AGSGGSGGSGGSPVPSTPPTPSPSTPPTPSPSQIFVKTLTGKTITLEVEPSDTIENVKAKIQDKEGIPPDQQRLIFAGKQLEDGRTLSDYNIQKESTLHLVLRLRGGGGSGGSGGSGGSAS

SEQ ID NO: 287 - protein, 52 aa, synthetic construct
  REGION 1..52: note = Description of Artificial Sequence: Synthetic polypeptide
AGGGSGGGGSGGGGSGGGGSGGGGSGGGGSGGGGSGGGGSGGGGSGGGGSAS

SEQ ID NO: 288 - protein, 33 aa, synthetic construct
  REGION 1..33: note = Description of Artificial Sequence: Synthetic polypeptide
AGGGGSGGGGSGGGGSGGGGSGGGGSGGGGSAS

SEQ ID NO: 289 - protein, 37 aa, synthetic construct
  REGION 1..37: note = Description of Artificial Sequence: Synthetic polypeptide
AGGGSGGGGSGGGGSGGGGSGGGGSGGGGSGGGGSAS

SEQ ID NO: 290 - protein, 42 aa, synthetic construct
  REGION 1..42: note = Description of Artificial Sequence: Synthetic polypeptide
AGGGSGGGGSGGGGSGGGGSGGGGSGGGGSGGGGSGGGGSAS

SEQ ID NO: 291 - protein, 47 aa, synthetic construct
  REGION 1..47: note = Description of Artificial Sequence: Synthetic polypeptide
AGGGSGGGGSGGGGSGGGGSGGGGSGGGGSGGGGSGGGGSGGGGSAS

SEQ ID NO: 292 - protein, 31 aa, synthetic construct
  REGION 1..31: note = Description of Artificial Sequence: Synthetic polypeptide
AGGSSGGSSGGSSGGSSGGSSGGSSGGSSAS

SEQ ID NO: 293 - protein, 36 aa, synthetic construct
  REGION 1..36: note = Description of Artificial Sequence: Synthetic polypeptide
AGSQMALHANVTGAMNYTWATCTINTHAPRSMLGSA

SEQ ID NO: 294 - protein, 43 aa, synthetic construct
  REGION 1..43: note = Description of Artificial Sequence: Synthetic polypeptide
GRMANFDGMDMSHKMALSSTNEIETNEGLAGTSLDVMDLSRVL

SEQ ID NO: 295 - protein, 49 aa, synthetic construct
  REGION 1..49: note = Description of Artificial Sequence: Synthetic polypeptide
SAAAATPAVRTVPQYKYAAGVRNPQQHLNAQPQVTMQQPAVHVQGQEPL

SEQ ID NO: 296 - protein, 50 aa, synthetic construct
  REGION 1..50: note = Description of Artificial Sequence: Synthetic polypeptide
VSGITGMVDPSRINVANLAEEGLGNIRANSFGYDSAAIKLRIHKLSKTLD

SEQ ID NO: 297 - protein, 51 aa, synthetic construct
  REGION 1..51: note = Description of Artificial Sequence: Synthetic polypeptide
ILTHDSSIRYLQEIYNSNNQKIVNLKEKVAQLEAQCQEPCKDTVQIHDITG

SEQ ID NO: 298 - protein, 57 aa, synthetic construct
  REGION 1..57: note = Description of Artificial Sequence: Synthetic polypeptide
KRSVKNPYPISFLLSDLINRRTQRVDGQPMIGMSSQVEEVRVYEDTEELPGDPDMIR

SEQ ID NO: 299 - protein, 58 aa, synthetic construct
  REGION 1..58: note = Description of Artificial Sequence: Synthetic polypeptide
CYGKKYGPKGKGKGMGAGTLSTDKGESLGIKYEEGQSHRPTNPNASRMAQKVGGSDGC

SEQ ID NO: 300 - protein, 19 aa, synthetic construct
  REGION 1..19: note = Description of Artificial Sequence: Synthetic peptide
VPSERGLQRRRFVQNALNG

SEQ ID NO: 301 - protein, 15 aa, synthetic construct
  REGION 1..15: note = Description of Artificial Sequence: Synthetic peptide
LLAPTRIYVKSVLEL

SEQ ID NO: 302 - protein, 19 aa, synthetic construct
  REGION 1..19: note = Description of Artificial Sequence: Synthetic peptide
VSPVASFNTLQLGERGNIV

SEQ ID NO: 303 - protein, 21 aa, synthetic construct
  REGION 1..21: note = Description of Artificial Sequence: Synthetic peptide
TEEPGAPLTTPPTLHGNQARA

SEQ ID NO: 304 - protein, 34 aa, synthetic construct
  REGION 1..34: note = Description of Artificial Sequence: Synthetic polypeptide
GYETIPLALPAFFPAPDNRGVEAPYRKEQRLGSA

SEQ ID NO: 305 - protein, 22 aa, synthetic construct
  REGION 1..22: note = Description of Artificial Sequence: Synthetic peptide
DVHNFSIKDVGTIITNKTGVSP

SEQ ID NO: 306 - protein, 21 aa, synthetic construct
  REGION 1..21: note = Description of Artificial Sequence: Synthetic peptide
GECLKCIYNTAGFYCDRCKEG

SEQ ID NO: 307 - protein, 30 aa, synthetic construct
  REGION 1..30: note = Description of Artificial Sequence: Synthetic polypeptide
QMALHANVTGAMNYTWATCTINTHAPRSML

SEQ ID NO: 308 - protein, 25 aa, synthetic construct
  REGION 1..25: note = Description of Artificial Sequence: Synthetic peptide
PPEATQNVAESTHNLTRNFPADLFN

SEQ ID NO: 309 - protein, 35 aa, synthetic construct
  REGION 1..35: note = Description of Artificial Sequence: Synthetic polypeptide
AGSVAETLKDNTQSKLTVKGNLDTYGFCDDVWTFI

SEQ ID NO: 310 - protein, 32 aa, synthetic construct
  REGION 1..32: note = Description of Artificial Sequence: Synthetic polypeptide
YVREEVFTNNADVVAEKALKPESDITFSKQTA

SEQ ID NO: 311 - protein, 33 aa, synthetic construct
  REGION 1..33: note = Description of Artificial Sequence: Synthetic polypeptide
TCHHRSPLSLTPPKCGSCHTKEIDAADPGRPNL

SEQ ID NO: 312 - protein, 34 aa, synthetic construct
  REGION 1..34: note = Description of Artificial Sequence: Synthetic polypeptide
LDTTAENQAKNEHLQKENERLLRDWNDVQGRFEK

SEQ ID NO: 313 - protein, 34 aa, synthetic construct
  REGION 1..34: note = Description of Artificial Sequence: Synthetic polypeptide
AQAERQRILERTNEGRQEAMAKGVVFGRKRKIDR

SEQ ID NO: 314 - protein, 35 aa, synthetic construct
  REGION 1..35: note = Description of Artificial Sequence: Synthetic polypeptide
GVTPSTTALPDIVNLSTNYLDKNTREDRIHSIKDF

SEQ ID NO: 315 - protein, 39 aa, synthetic construct
  REGION 1..39: note = Description of Artificial Sequence: Synthetic polypeptide
TKLPEAQQRVGGCFLNLMPQMKTLYLTYCANHPSAVNVL

SEQ ID NO: 316 - protein, 33 aa, synthetic construct
  REGION 1..33: note = Description of Artificial Sequence: Synthetic polypeptide
SGGSSGGSSGSETPGTSESATPESSGGSSGGSS

SEQ ID NO: 317 - protein, 85 aa, synthetic construct
  REGION 1..85: note = Description of Artificial Sequence: Synthetic polypeptide
GGSWCIFVYNLSPDSDESVLWQLFGPFGAVNNVKVIRDFNTNKCKGFGFVTMTNYDEAAMAIASLNGYRLGDRVLQVSFKTNGGS

SEQ ID NO: 318 - protein, 62 aa, synthetic construct
  REGION 1..62: note = Description of Artificial Sequence: Synthetic polypeptide
AGSKPFGKSKGFGFVCFSSPDEASKAVTEMNQRMVNGKPLYVALAQRKDVRRSQLEASIGSA

SEQ ID NO: 319 - protein, 207 aa, Aquamicrobium sp.
KKGKPIYVPNSFGEELGKKIKRKVAKKYTFDNFIYHFKDGSHVVALHRHRKNAFFCRVDISRFFYSVKRNRLKRVLKSIGISKAEHYAKWSTVKNPFDGGGYVLPYGFIQSPILATLVLAESPIGAFLRGLPETITPSVYMDDLCLSGQDEAELKVAFDGLVAAVVDAGFTLNDEKTREPAPQIDIFNCSLESGSTVVLPERIEEFF

SEQ ID NO: 320 - protein, 213 aa, Bradyrhizobium sp.
FELKYRTRGKWIFVPTDQCERKGRRIIQYFSRFKFPDYFYHYQPGGHIAALHAHLQHKLFFKIDIQNFYYSIARMRVTRALRSHAYPGANTLAKWSTVRNPYGGPLAHVLPIGFVQSPLLASLVLMKSPVAEAIERARKSGVTISVYMDDFIGSHDDEATLQAAYADIRDASVRAGLLPNPAKLVAPTAAITAFNCDLSFGAANVSIDRVAKY

SEQ ID NO: 321 - protein, 220 aa, Mesorhizobium sp.
MTVKFETYRYSYLRKGKPVFVPSERGEAIGRELKAKVEAAINFEDIYYHLREGGHVAALHAHRDHRYFARVDIERFFYGISRNRVARELHGIGIEKAGYFAKWSCVKNPFEEPRYALPYGFVQSPILATLVLTRSGVGAFLRGLPENVTASVYMDDIALSCDDAEALQATYAGLRAALEESNFAINEDKAQRPAEAIELFNCALSQRFTSVLQARRDDFF

SEQ ID NO: 322 - protein, 218 aa, Microvirga massiliensis
LENYKEKYKHEGKFIFVPNYECIRKGLRIVEFCRDRLEFPDCFYHYRNGGHVAALHRHLDNRFFFRIDLQNFYYAISRNRVCAALHASGFHKARTYGKWSCVRNPVAEDPRYSLPIGFVQSPALASLVLMRSPIMGAISAAERDSVFISVYLDDLIGSSTDFSLLERAYYTILEACGAANLQVNARKLLPPASEIHAFNCVLKHGLAEVTDERIRKFV

SEQ ID NO: 323 - protein, 229 aa, Sphingorhabdus pulchriflava
MTVAIRNYSFKYDRRGKPVFAPSNVGRRIGNEVKEAVEGAFAFSPLYFHFRAGGHVAAIHHHRPHRFFARIDISRFFYSISRRRVQSALDRIGVANAAFYAKWSTVTNPFEAPRYALPYGFVQSPILASLVLASSSVGEHLSSLSPDVTVSVYVDDISLSADRLDALQAAYDATLAVLESDGFLVSADKLRPPAAAIDVFNCDLAQGLSKVQDDRINQFMADLPSHEAE

SEQ ID NO: 324 - protein, 229 aa, Sphingomonas sp.
MPVQFQNFDYTYQRNGKPVFAPSPLGRQIGEDIKEQVEAKYQFDDFVFHLRKKGGHVAALHSHRPHGYFARVDIRRFFYSVARNRVQRALATIGIPRARHYAKWSCVKNPYDLPTYSLPYGFVQSPILASLVLMESAVGSFLRGLVAENHVTVSVYMDDISLSSDDLPRLQAAFNRLVHDLAEARFQVSPAKLRPPGPVMDLFNCDLRQGETVVREERIDLFEAEPQSH

SEQ ID NO: 325 - protein, 243 aa, Tsuneonella flava
YDHHFALKPGTRVYIPTEMGRKRGTEIKGAIEGLWKPPANYFHLLEGGHVAAVKSHRNATWLASLDLQRFFDQITRTKIHRALKVIGLPHQDAWEMACDSTVDKKPPKRHFSLPFGFVQSPIVASVVLAQSALGGAIRNLVAGGLTVTVYVDDITISGSSEEQVFAAVEQLETGAELAGLAFNPEKTQLPNGAVTSFNIAFGSGALEVKEDRMAEFEVAIRNGNEYQIEGILGYVGSVNHGQA

SEQ ID NO: 326 - protein, 246 aa, Burkholderia lessedis
KWLHKFERKPGRWVFEPSPEARAEGVEVKELVESHWKAPSYYFHLRQGGHVAALMRHQRSTCFVKVDIADFFGSVSRSRISRVLKEFVSHAEARRIATASTVQHPEDPARQILPYGFVQSPLLASLALHKSGLGKYLDQLHRENSVVVTVYVDDIIVSGNDPEELGDVLTTMKTKAQRSRLAFSDDKEQGPAATISAFNIELAAGTPLSVLPPKLAEFREAFQASTSELQRAGIQGYVRSVNPVQA

SEQ ID NO: 327 - protein, 250 aa, Stenotrophomonas maltophilia
MKRWEHRFQVKSGRWVFVPTPASRAVGEQIRARVAKAWSPPAFYYHLRKGGHVAALRAHADSTYFFRCDLKNFFGSINLSRVTRCLKRYFSYVEARGMASASVVIAPGATKTMLPYGFVQSPLLASLALDQSRAGAYLRKLSAQEGITVSVYMDDIVVSSLEIGLLDKIKAELGEKAEKAGISLNQEKTEGPSTLVTVFNVELSHNSLVISEERMAEFREALMIASCDAVAMGILGYVASVNDAQLSKLY

SEQ ID NO: 328 - protein, 244 aa, Roseovarius sp.
MRNFNHKIDLGNGKWAYVQEKHLIPHARRMTNLIIERARFPKFYFHFHSGGHVMASKLHSENSFFSHIDLERFFYHVSKNKIVRSMKKVGFGFREAEGFAVVSTVRSEKGFTLPFGFVQSPALAALVLDQSQLGKTLREIAPNVQTTLYGDDILLSSKNEKTLREASDNVLLACQKANFPTNQEKTKVVQTKITAFNINISRNCLEITEERMNDFYVNIRHLGNCPTTQGILGYVSRVNQRQAE

SEQ ID NO: 329 - protein, 249 aa, Pseudomonas lurida
KWLSRFRLKSNTWVYVPTFETVKEGKLFKKAIEFKWIPPTNYYHLRSGGHVEAVKYHLGGKFFVHADISKFFNSINRSRITRELKPYFGYERSRAIAMESTVSIPVDSGQIFALPFGFVQSTIIASLCLRKSSLGKTIDVLNKTDGIRVSVYVDDIVVSTQCLEKAKAAFLMIQKSAERSGFLLNKEKSQGPSDKITAFNIDLRQNFMEVTSWRFSELLSSYKDATSDKKKSGIWGYVNSVNSAQASML

SEQ ID NO: 330 - protein, 248 aa, Vibrio sp.
WSNRFEIKPGRWVYNPTKESRLIGQKIIKLLNKSWKKPPYYYHLRCGGHVEALAIHLENQFFATVDISDFFGHISRSRITRALKPIVGYEVARKIAKLSTIKTTENYTHSHHLPYGFNQSPILASICLFNSTLGKYLETAANDENITVSVYMDDIVISSQNEELLTQTFDQIFFTAKKSKFVINENKTKPVAKQTEAFNIVITHGDMKIEYDRLVKFQHAYSGSNSEHQRHGIGSYVGSVNKAQAKLL

SEQ ID NO: 331 - protein, 250 aa, Vibrio parahaemolyticus
WKNRFEVKPGTWVYEPTLESKKYGRELITQIRKKWKAPEYYYHLRDGGHVKALEKHTANNFFASLDIKDFFGSISRTRVTRTLKPLFGYDIARKLAKLSSVKNDGSKAHSHSIPYGYVQSPILASICLHKSTFGSELDSCFNDQNVTISVYVDDIVISSNDKKLLKHWCERLKNAAKRSKFTLNALKESPADSTVVAFNIEVTHNSMVITKERFKLLYEAYQNSQSIMQRKGIGGYVGTVNKSQARLLDL

SEQ ID NO: 332 - protein, 252 aa, Ewingella americana
MDKWIHKFEIKEGRWVYVPSEKTREIGGKIHFYIKHKWNYPLYMYHLRKGGHVAAANRHIKKQYFSLIDISDFFGSTSQSRVTRELGKLIPYAKAREIAKLSTVRSPPSNGLKHVIPYGYPQSPILATLCFHQSFCGKLINIISKSGQISVSIYMDDILLSSDDLSQLEIAFNSVKAALAKSGYCINERKTQSPSTMVKVFNLELSQQSLRVSPKRIVEFLQAYISSKNAAERKGIASYVGSVNKSQSTIFK

SEQ ID NO: 333 - protein, 253 aa, Enterobacter cloacae
MKPTWLHKFEVKENRWVYIPDAETHHLGQKIHTYIKHKWKSPLYMFHLREGGHVAAANYHIKKKYFSLIDISNFFGATSQSRVTRELGRLIPYVKAREIARLSTVKNLNGNGLKHVIPYGYPQSPILASLCFHQSFCGSTINTVSKSGHVSVSIFMDDILLSSDDLGQLENAFDIILEAIRRSGYTVNENKTQPPSLMVNVFNLELSQNSLRVTSKRIVEFLQAFISSKNPHERKGIASYVGSINTAQAKLFR

SEQ ID NO: 334 - protein, 250 aa, Nitrosomonas halophila
ERWNSKFQIKKGAWVFIPTKETIDNGLQIKKLIEKHWSFPKYYFHLIKGGHVRALHEHKKHKFFIHLDIKNFFGQINRSRVTRSLKEYVSYEKAREIAVESTVRLPESTEVKYILPFGFVQSPIIASICLSKSALGRHLTSLKQQNEYAVSIYMDDILVSANNSEKLMMEIMRIKAASEKSKLLLNAAKQVGPDTRIKAFNIEISQDLLQITPSKLQELANTYATSENDHQRAGIFNYVLSVNPSQVEAF

SEQ ID NO: 335 - protein, 255 aa, Kalamiella piersonii
MNTENEWLHKFEIKPGRWVYIPNEATLKQGKLIHAYIRSKWKSPLYMFHLREGGHVAAANHHVQKKYFALIDIQDFFGATSQSRITRALGNFIPYDKARKIAKLSTVKNQNGNGLKHVIPYGYPQSPILASFCFHQSFCGDLIKNISKSGDISVSIYMDDILLSGNDLGRLEDTFKAVNEALVKSGYTVNRSKTQLPSTIVNVFNLELSQNSLRISAKRIVDFLQTYISSSHPPEKKGIASYVGSVNKEQARLFK

SEQ ID NO: 336 - protein, 251 aa, Polynucleobacter sp.
MTYEAKWINKFLLKPKKWVFVPSKQSKIIGKNICRLLRKHWDPPEYFYHLRNGGHVEALRAHEQNQYFSRLDIDNFFGSITRSRITRSLKKFVSYKTAWDIAHQSTVKDPDCISMRFMLPFGFIQSPLLASICLDQSFLGEFLKLLNKNPQLSLSVYMDDLVISSNDRDLLLSISADLKNAIVKSHWSSNEQKEDICKQLIMAFNIEISHQSTRISDPRMQEFKYSYKHAANSNSKLGIVNYIRSVNPVQG

SEQ ID NO: 337 - protein, 255 aa, Serratia plymuthica
MSTPSDWLHKFEIKAERWVFVPSKETLKRGQKIHAYIKQKWKYPRYMFHLRNGGHVAAANFHLKSNYFSLIDVSDFYGTTSQSRVTRELGRLVPYVKAREIARLSTVVNPNRNGFKHVIPYGYPQSPILASLCFHHSFCGGVISSISKSERVFVSVYMDDILLSSDDMNLLVEAFDTVRQALRKSGYTLNENKTQPPSPKIQVFNLELGHNHLRVTPKRIVEFLKVFTSSSNEHERKGIASYVGSINKSQAKLFR

SEQ ID NO: 338 - protein, 254 aa, Cronobacter universalis
MEKWKHKFLLKENKWVHIPSEEMIKYGSALHRYIRKNWRFPLYYYHLRNGGHVAAARLHKRNNYFCLIDIKGFFESTSQSRVTRELKKIIPYDKARLIAKLSTVRLPNAVGHKFAVPYGYPQSPVLATLCLQNSYAGNVIDSFHRSGCVTVSVYMDDIILSCKSLVTLNQHFDVLCKALRKSRYELNASKTQSPAAKISVFNLELGHQHLKVESERMMLFIQAFAKSGNEHERKSIAKYVNTVNASQARHHFPK

SEQ ID NO: 339 - protein, 257 aa, unidentified
  REGION 1..257: note = Description of Unknown: Enterobacteriaceae sequence
MTIEVQRWEDKFEIKPGVWVYIPSVEARKVGGKILQAVRNKWIPPLYFYHLRTGGHLKAARLHLKSDFFAVVDIKQFFQSTSRSRITRDLKSYFTYSQAREISTFSTVRNLSHSPHKHVLPFGFVQSPILATLCLDKSYFGSLLRRLNKHHDLKLSVFMDDVIISSNDLAQLQAAYDEALVAMRKSGYQANMSKTQAPSSKISVFNLTLSKGVMKVTSQKMSDFLIDFYSSNYEPHRIGVKNYVEAVNPGQAKLFKL

SEQ ID NO: 340 - protein, 257 aa, Klebsiella pneumoniae
MTIEVQRWEDKFEIKPGVWVYVPSVEARKVGGKILQDVRNKWIPPLYFYHLRTGGHLKAARLHLKSDFFAVVDIKQFFQSTSRSRITRDLKSYFTYSQAREISTFSTVRNLSHSPHKHVLPFGFVQSPILATLCLDKSYFGSLLRRLNKHHDLKLSVFMDDVIISSNDLAQLQAAYDEALVAMRKSGYQANMSKTQAPSSKISVFNLTLSKGVMKVTSQKMSDFLIDFYSSNYEPHRIGVKNYVEAVNPGQAKLFKL

SEQ ID NO: 341 - protein, 256 aa, Escherichia coli
MTLELQRWKHKFEIKPGVWVFAPSPEAVKNGSKILNAVRKHWNPPLYFFHLRTGGHLKATRLHLKNTYFAVVDIKQFFLSTSRSRVTRCLNEYFSYEKAREISRYSTVKNPSSGLHKYVLPFGFVQSPILATLCLDKSYLGSLLRKLSRKGTMKLSIYMDDVIISSNDFQTLQTTYQEILQAMEKSGYKLNLKKSQPPSNKIVVFNISLRHGNMSVTAERLSEFLIDFYASNDEQHKLGIANYVRSVNLEQAKLFR

SEQ ID NO: 342 - protein, 252 aa, Enterobacter hormaeche
MVKWEHRFELKKDKWVYVPTKEMRLYGTEIHNHLRAKWIPPLYFYHLRDGGHVACAKKHLHNRYFALIDIKNFFESTGQSRLTRELKTYLTYNNARQVAKLSTVRNPLPERPKYIIPYGYPQSPILSTFCLHKSFCGNLFKQLHVNPDIDISIYMDDIILSANDLSSCESAYRLLSEGLERSGYQMNTLKSQFPSEKIHVFNLELKHNSLRVLPFRLIEFLIAYTKSKNRHERKGIASYVGSVNTDQAKLFK

SEQ ID NO: 343 - protein, 257 aa, Enterobacter sp.
MEIEVQRWEHKFEIRPGVWVYVPSVRTSELGERILQSIRNKWIPPLYFYHLRTGGHLKAARLHLKSSFIAVIDIKHFFQSTSRSRITRDLKAYFTYSQAREIAKFSTVKNLSDTPHKHVLPFGFVQSPMLATFCLDKSHLGSLLRRLNKHPNVKLSVYMDDVIISSNDIVQLQTTYDEILLAMDKSGYQVNMIKTQAPSSLIKVFNLYLSKGNMKVTSQKMSDFLIDFYASDYEPHKIGVKNYVESVNPEQAKLLKL

SEQ ID NO: 344 - protein, 256 aa, Yersinia enterocolitica
MSNMAPRWINKFEIKPNVWVYEPSEACREEGAEILRFINRKWKIPTYYYHLRRGGHVEALRVHIENDWFVSLDIKEFFQSTSRSRVTRTLRNFLPYEKARIIAKVSTVSNFTNDKFSHFIPFGYVQSPLLATICLHYSSFGQLIKELSRCEDVKLSVYMDDIILSSSSLELLERTKTLLEESASRSHYKLNTLKVQGPAERITAFNIDLSHQSMVISPKRLLSFLVDFNSPDSDNLKREGIRSYIYSVNSEQAEYF

SEQ ID NO: 345 - protein, 435 aa, unidentified
  REGION 1..435: note = Description of Unknown: Candidatus Magnetomorum sp. HK-1 sequence
MSTIDVTLKEVADPIRLKLAWTKIKKKGSIGGVDGVTISSFNANLEVNLSELSNQILTNQYTPEPLQAAHIPKPGKSEKRQLGLPSLKDKIVQSSLASILSDFYEIHFSNCSYAYRPGKGSVKAIGRVRDFLNRKNYWIASVDIDNFFDSVDHEICTSILKEQISDQSIIRLISLYFSSGMIKFDQWQDTEIGIPQGGAISPVISNIYLNKLDHFLHTLNAFFVRYADDIILFSNTQQSLSETYQKTNEFLNKKLNLKLNALDNPIINVSKGFSFLGIYFHRCQLKIDFKRIDEKIEKMKYIIHKQKQIDAVIKEINEFFNGVQRHYGNIIPDSYQLKNLESTVLDELSIFLAKMKNEGHINSKKACKLVLDPLVFMSERTKSQRDAVIDKIIADAFTIVDQKKDTDEKRIEKSVDSAIHQKRQAYAKKIATETE

SEQ ID NO: 346 - protein, 437 aa, unidentified
  REGION 1..437: note = Description of Unknown: Tissierellia bacterium sequence
AGVQRTLPAETDGQDNGEASTFDLLERILSSNNMNAAYKQVVRNKGSHGIDGMKVDELLPHLKENGNNLIEELKAGTYRPKPVRRVEIPKPDGGVRLLGIPTVVDRMIQQAIAQILTPIFDPEFSESSFGFRPGRSAHQAIKRAQEYMDEGYNWVVDIDLAKYFDTVNHDKLMALVARKVKDKRVLKLIREYLKAGVMINGVVIETEEGCPQGGPLSPLLSNIMLDELDKELEKRGHKFCRYADDCNIYVRSRKAAERTMQSVTKFLEGKLKLKVNREKSAVDRPWKLKFLGFSFYRGKEGIRIRVHRKSIERVKEKIRNITSRSNGMSMDTRLLKLKQLIRGWVNYFRIADMKSLAQSLDEWTRRRLRMCIWKQWKRVRTRFQNLMKLGLDRQKALEFANTRKGYWRIANSPILSVTITNERLQKRGYTGFVAELA

SEQ ID NO: 347 - protein, 418 aa, Oceanobacillus timonensis
LEQILARENLMTALHRVERNKGSHGVDGMPVQNLRAHIMEHWASIREQLETGTYYPQPVRRYEIHKEGGGMRKLGIPTVLDRFIQQAIAQVLTTIYDPTFSENSYGFRPKRRGHDAVRKARAYMKDGYRWVIDMDLEKFFDKVNHDRLMRTLSRRVKDPKVLQLIRRFLQAGIMEDGVVHPNTEGASQGGPLSPLLSNIVLDELDKELEKRGLHFVRYADDFHIYVRSKRAGHRIMESITNFIEKKMKLEVNKEKSAVDRPWKRKFLGFSFTFHKENPKIRIAKESIKRFKRRIRELTSRKKSMNMGDRIEKLNQYLAGWLGYYQLAETPTIFKELDGWIRRRLRMIRWKEWKKVKTKHKNLVKQGIKKGKAWEWANTRKSYWRTANSPILHRALGDQYWSEQGLKSLTNSYLTKRWT

SEQ ID NO: 348 - protein, 419 aa, Paenibacillus sp.
LEQLLSRENLLQALKRVESNKGSHGVDGMTVKSLREHIVQNWQKIRQAIEEGTYEPSPVRRVEIPKPNGGGVRKLGIPTVTDRMLQQAIAQVLTPWFDPPFSEHSYGFRPKRRGHDAVRKARTFMKEGYRFVVDLDLEKFFDRVNHDRLMMKIAEKVKDKKVLLLIRKYLQSGVMENGLVQPTREGAPQGGPLSPLLSNIVLDELDKELEKRGHRFVRYADDCNIYVKTLRAGERVKASVTRFIETRLKLKVNQAKSAVDHPWKRKFLGFSFSTDIEPKVRIAKQSLQKAKVRIREITSRKKPMRMEERMKELNQYLMGWCGYFSLADTPSIFQRMDAWIRRRLRMCLWKQWKNPRTKVKRLLSLGMPKGKAYEWGNTRKGYWRIAGSPILSRALNNQYWESNGLKSLLDRYNSIRNIS

SEQ ID NO: 349 - protein, 418 aa, Bacillus sp.
LMKPILSRENLLNALKRVERNGGSYGVDKMSTQNLRLYIVEHWAELRNALQQGTYEPQPVRRVEIPKSNGGVRLLGIPTVLDRFIQQAITQTLTPIYDPTFSENSYGFRPQRRGHDAVRKAKGYIEEGYRWVVDIDLEKFFDKVNHDKLMGLLSKRIDDKTLLGLIRKFLNAGIMIGGVVSQNTEETPQGGPLSPLLSNIILDVLDKELEDRGHKFVRYADDCNIYVKSKKAGIRTMEGITAFIEKGLSLKVNHDKSAVDRPWNRKFLGFSFTNRKEPKIRIAKQSIKRFKLKVKEITSRKSPIPMEIRIQKLNQYLVGWCGYYALADTPSVFKDLEGWIRRRLRLCYWKQWKLPKTRIRKLIGFGIDKHKAYEWGNTRKGYWRITNSPILSRALNNAFWRKEGLKSLYERYESLRHT

SEQ ID NO: 350 - protein, 419 aa, Sporosarcina sp.
LMERILSKENLLSALKRVERNKGSHGVDEMRVQNLRTHIVNHWEPIKMELLKGDYEPQPVRRVEIPKPDGGVRLLGIPTVMDRFIQQAIAQILTSVYDPMFSDHSYGFRPKRSAHDAVRKAKGYLTEGNRWVVDIDLEKFFDKVNHDRLMGTLAKRIQDKRLLKLIRKYLKSGIMINGIVSASEEGTPQGGPLSPLLSNIVLDELDSELEKRGHKFVRYADDCNIYLKTKKAGSRVMNSVTSFIEKKLKLKVNLDKSAVDRPWKRKFLGFSFTFHKEPKVRIAKESLQRMKNKIREITSRKKPCPLAYRIKKLNQYLMGWCGYFALADTPSVFRNFDSWIRRRLRMCMWKAWKLPKTKVRKLTGLGIPKGKAYEWGNTRKSYWRISNSPILHRALDNSYWNHQGLKSLSSRYEVLRNQP

SEQ ID NO: 351 - protein, 418 aa, Bacillus freudenreichii
MERILSRGNLLSALKRVERNKGSHGVDGMSVQNLRRHIMEHWESLKAELLEGTYQPQPVRRVEIPKPDGGVRLLGIPTVTDRFIQQAIAQVLSSIYEPTFSNHSYGFRPNRSAHDAVRKTKEFIKEGKRWVVDIDLEKFFDRVNHDRLMGTLSKRIKDKRLLKLIRSYLKAGVMINGLVSANEEGTPQGGPLSPLLSNIVLDELDKELEKRGHAFVRYADDCNIYVNTQKAGSRVMASLTSFIEGKLKLKVNQGKSAVDRPWKRKFLGFSFTSGKEPKVRIAKESIKRMKQKIRDITSRKKPYPMEYRIEKLNQYLMGWCGYFALADTPSIFIRLDSWIKRRLRMCRWKEWKQPKTKMRKLIGLGVPKWQAYEWGNSRKGYWRISKSPILHKTLGNSYWSTQGLKSLISRYESLRHIS

SEQ ID NO: 352 - protein, 419 aa, Niallia circulans
LLNQILSRENMLQALKRVEQNKGSHGVDWMPVQILRQHIVENWHSIREAIFKGTYEPMPVRRVEIPKSDGGVRLLGIPTVKDRLIQQAIAQVLSKIYDPMFSEHSYGFRPNRSAHDAVRKAKGYIKEGYRWVVDMDLEKFFDKVNHDRLMGTLAKRINDKPLLKLIRKYLQAGVMMDGVISSTEKGTPQGGPLSPLLSNIVLDELDKELESRGHKFVRYADDCNVYVKSKRAGERTRASIQRFIEKKLRLKVNEKKSAVDRPWKRKFLGFSFTSSKEPKIRIAKESLKRMKMKIREITSRKMPYSMRYRMEKLNQYLMGWCGYFALADTKSLFIKLDGWIRRRLRMCQWKDWKKPKTRIRNLIHLGVPKGKAYEWGNSRKGYWRVSNSPILDKTLDISYWNNQGFKSLQTRYKFLRHLS

SEQ ID NO: 353 - protein, 419 aa, Lysinibacillus sp.
LMNQILSRENLLLALKRVERNKGSHGVDKMPVKFLRQHVVENWLTIKKQILEGTYQPQPVRRIEIPKPDGGVRLLGIPTVTDRLIQQAIAQVLSNLYDPNFSNHSYGFRPKRSAHDAIREAKGYIKEGYRWVVDMDLEKFFDKVNHDRLMSTLAKKISDKPLLKLIRRYLQSGVMINGVVYDTDEGTPQGGPLSPLLSNIVLDELDKELEKRGHKFVRYADDCNIYVKTKRAGERVMASIKTFIEKTLRLKINEKKSAVARPWQRKFLGFSFTSRKEPQVRIAKESIKRMKNKIRELTARKKPFPMEYRIQQLNQYLIGWCGYFALADTKSIFESLDGWIRRRLRMCLWKDWKKPRTKVRNLIRLGVPDWKAYEWGNTRKSYWRISKSPILHRTLGNSYWSNQGLKSLQARYEILRYSS

SEQ ID NO: 354 - protein, 419 aa, Psychrobacillus vulpis
LLNQILSRENLLQALRRVEKNKGSHGVDKMPVQTLRQHMKDNWLSIKEQLLEGTYEPQPVRRIEIPKPDGGVRLLGIPTVTDRLIQQAIAQVLSRLYDPTFSEHSYGFRPNRSAHDAVRKAKGYIKEGYRWIIDMDLEKFFDKVNHDRLTSTLAKRINDKPLLKLIRKYLQSGVLINGIVLDINEGTPQGGPLSPLLSNIVLDELDKELEQRGHRFVRYADDCNIYVKSKRSGERVMESVQTFIERKLRLKVNKKKSAVDRPWKRKFLGFSYTSNKEPKVRIAKESLQRMKKKIREITSRKKPYPMEYRIEQLNRYLIGWCGYFALADTKLIFGEIDGWIRRRLRMCLWKNWKKPRTKVRNLIRLGIPDGKAFEWGNTRKGYWRISNSPILSRALNNSYWSNQGFKSLQARYEILRYSS

SEQ ID NO: 355 - protein, 418 aa, unidentified
  REGION 1..418: note = Description of Unknown: Bacillaceae sequence
MERILSRENLLNAIKRVEKNKGKHGVDEMPVAALRGHIMLNWNELRKSLSEGTYIPSPVRRVEIPKPDGKGKRKLGIPTVTDRFIQQAITQVLTKMYDPGFSECSFGFRPKRRAHQAVKLAQSYIEEGYRWVVDIDLEKFFDKVNHDKLMSKLAERINDRTLLKLIRRFLTSGVMEGGLVSPNLEGTPQGGPLSPLLSNIVLDELDTELERRGHRFVRYADDCNIYVKSKRAGERVMKAMTHFIEGKLKLKVNRDKSAVDRPWRRKFLGFSFTSNLKPKVRISPQSIKRFKDKIRKLTSRRRSIAMEVRIHDLNEYLVGWVNYYHLADTRSVITKLEGWVNRRLRMIRWKEWKLPRTKIKKLIELGVPEGKAYKWGNTRKAYWRISKSPILHKTLGKAYWLSLGLKSISARYDLQRST

SEQ ID NO: 356 - protein, 419 aa, Thermaerobacter subterraneus
DLMEQVVARENMWAALRRVEQNRGAPGVDGMTVEQLRGFLREQWSQVRAQLLAGTYKPQPVRRVEIPKPGGGTRLLGIPTVLDRLIQQALLQVLTPIFDPDFSEHSYGFRPGRSAHQAVEAARRHVEEGYAWVVDLDLEQFFDRVNHDVLMARVMRKVADKRVRMLIRRYLQAGVMVGGVKVRTEEGTPQGGPLSPLLANILLDELDKELERRGHRFVRYADDCNIYVRSERAGHRVMAGVRRFLEKRLRLKINEQKSAVDRPWRRKFLGFSMYRGREGIRLRVAPQTVQRLKDRIRGLTSRTWPVSMPERIRRINAYLRGWLAYFRIADMAVLLRNVEGWLRRRLQACLWKQWKRPRTRLRELRALGHPEWRVRQWALSRRGYWAMAGGPLNSALGKPYWLAQGLLSLTRCYHELRRA

SEQ ID NO: 357 - protein, 423 aa, Caenibacillus caldisaponilyticus
ALLETILSRNNLITALKRVEANKGAPGIDGVPTEQLRDDIRKHWKSIKRQLLEGTYKPAPVRRVEIPKPNGGVRLLGIPTVMDRFIQQAILQVLTPIFDPHFSPYSYGFRPKRRAHDAVRQAQKYIQEGYRYVVDIDLEKFFDRVNHDILMSRVARKVEDKRVLKLIRAYLKAGVMLEGVRVRSEEGTPQGGPLSPLLANILLDDLDKELEKRGLKFCRYADDCNIYVRSPRAGQRVKQSVQKYLEKKLKLKVNEEKSAVDRPWKRKFLGFSFTSQREARIRLAPKSVQRFKNKIRQLTNPNWSLPMEERIRKLNQYTMGWMGYFALIETPSPLKRLEEWIRRRLRLCRWHQWKRVRTRIRELRALGLKEHEVFEIANTRKGAWRTTRTPQLHKALGKAYWLKQGLKSLTQRYFELRQDWRTA

SEQ ID NO: 358 - protein, 419 aa, Caldibacillus debilis
ALLERILARDNLITALKRVEANRGAPGIDGVSTDQLRDYIRTHWSSIRAQLLEGTYRPTPVRRVEIPKPNGGIRLLGIPTVMDRLIQQAILQELTPIFDPDFSPYSFGFRPGRSAHDAVRQAQRYIREGYRYVVDIDLEKFFDRVNHDILMSRVARKVKDKRVLKLIRAYLQAGVMIGGVKVQTEEGTPQGGPLSPLLANILLDDLDKELEKRGLKFCRYADDCNIYVKSLRAGLRVKQGIQRFLEKKLKLKVNEEKSAVDRPWKRTFLGFSFTPEREARIRLAPKSIQRFKQRIRQSTNPNWSLPMEERIRRVNQYTMGWMGYFQLIETPSILRNMEGWVRRRLRLCLWLQWKRVRTRMRELRALGLNERTVLEIANTRKGAWRTTKTPQLHQALGKSYWKAQGLKSLTQRYFELRQG

SEQ ID NO: 359 - protein, 466 aa, Brevibacillus composti
CRKQNSERNSFGKVGVKPRGYRRGQSIDRQDLSLVLRREKYRVELLEQILERKNLLEALKKVESNGGAAGIDGVSTEHLRAYVVEHWEKIRQQLLDGTYKPAPVRRVEIPKPDGGVRLLGIPTALDRMLQQAILQVLTPIFDPGFSPNSFGFRPGKRGHDAVRQAQRFIREGYRIVVDIDLEKFFDRVNHDILMSRVARKVKDKRVLKLIRKYLKSGVMAGGIVSHTEEGTPQGGPLSPLLSNIMLDDLDKELERRGLHFSRFADDCNIYVKTKRAGERVKASIERYLEGKLKLKVNKEKSAVERPWKRKFLGFSFTAQKEARIRISPKSLKRVKDKIRTLTKPTWSISMKERIQQLNQYLMGWIGYYALIETPKPLAELESWLKRRLRLCLWHQWKRVRTRYRELRKLGLTHQQAFEIASTRKGAWRTSITPHLHKALGNAYWQSQGLKSVTQRYFEIRQGWRTA

SEQ ID NO: 360 - protein, 423 aa, Thermicanus aegyptius
DLMEQILSRQNLLEALHRVESNKGAVGIDGVSTEQLREYVMKHWGTIRQQLLEGTYKPSPVRRVEIPKPDGGVRLLGIPTVIDRLIQQAILQVLTPIVDPGFSPNSFGFRPNRRGHSAVRQAQRFIREGYRIVVDIDLAQFFDRVNHDILMSRVARKIKDKRVLKLIRAYLQSGVMTGGVCVSSEEGTPQGGPLSPLLGNILLDDLDKELERRGLRFCRYADDCNIYVKTRRAGERIKASVTRFLEGRLKIKVNEEKSAVDWPWKRKFLGFSFTFEKEARIRLAPKSLKRVKNKIRELTTPTWSISMKERIRILNQYLMGWMGYYALIETPSILKTLEQWTRRRLRLCLWHQWKRVRTRIRELRALGLPERQVLEIANTRKGAWRTSQTPHLHKALGIAYWQSQGLKSLTQRYNELRQGWRTA

SEQ ID NO: 361 - protein, 462 aa, Thermobacillus composti
RSRDGHRQQNTSQEGCQREVAVKPQGTVGVPSPLPAQIAPSSRKAQDDLLEKMLERENLLKAYRKVVQNGGAPGVDGVTVTELQAYLNTHWEAVKAALLAGTYSPLPVRRVEIPKPGGGVRLLGIPTVMDRLLQQALLQVMEPIFDPHFSWHSYGFRPGKRAHDAVRQAQQYIQSGLRWVVDMDLEKFFDRVNHDILMARVARRIDDKRVLKLIRAYLNAGVMAGGVVVRTEEGTPQGGPLSPLLANILLDDLDKELTRRGLHFVRYADDCNIFVASKRAGERVMESVIRFVEGKLKLKVNRDKSAVDRPWNRKFLGFSFLSNKQATVRLAPKTIQRFKKKVREITDRSRPLTMEERIHRLNRFMMGWIGYFRLAAAKNHCGNLDAWMRRRLRMCLWKQWKRPRTRLRNLRALGVPEWAARMMANSRRGPWEMSRNTNNALPTSYWEAKGLKSLLSRYLELC

SEQ ID NO: 362 - protein, 462 aa, Paenibacillus sp.
RSHEEQRQPNISQESCQQREAVKPSGYAGAPSSSSAQVAPSSREDQNNLLERLLEGDNLRLAYKRVVQNGGAPGVDHVTVANLQAYLKTHWETVKAELLTGTYRPAPVKRVEIPKPGGGVRLLGIPTVMDRFLQQALLQVMNPIFDAQFSWYSYGFRPGKSAHGAVKQAQRYIQSGLRWVVDLDMEKFFDQVNHDMLMARVARKVADKRVLTLIRAYLNAGVMVDGKLERSWEGTPQGGPLSPLLANILLDDLDKELTGRGLRFVRYADDCNIFVASKRAGERVKESVCRFVEGKLKLKVNREKSAVARPWHRKFLGFSFLSQKQATIRLAPKTISRFKEKIRELTNRTWSISMEERISRLNRYMMGWIGYFRLASAKTHLQNLDQWIRRRLRMCLWKQWKRVRTRIRELRALGVPEWACFMMGNSRRGVWEMSRNINNALRASYWEAKGLKSLLSRYLELG

SEQ ID NO: 363 - protein, 409 aa, unidentified
  REGION 1..409: note = Description of Unknown: Synergistales bacterium sequence
ERVLSQQNMHEALKQVRRNKGAAGIDGMETADLRPWLIEHWVRIREELLGGTYKPLPVRRVEIPKPDGGVRLLGIPTVVDRLIQQALHQELYHIFDPGFSESSYGFRKYHSARQAVEKARRYIGEGFRYVVDMDLEKFFDRVNHDMLMARVARKVTDKRVLKLIRAYLEAGVMTGGLFGETREGTPQGGPLSPLLANIMLDDLDKELEKRGHRFVRYADDCNIYVRSRRAGERVMDGMRKFIENRLKLKVNEAKSAVDRPQNRKFLGFSFTGEKEPRIRIAPKALERFKNTVRRLTDRGRSTSTEERIRRLSEYLRGWAGYFRLAQTPSVFQKLDRWIRRRLRMCILKQWKNIRTKRRKLVSLGLSHDDAMKIASSRKGYWRLAETPQLHIAMGNRYFKTLGLVSLASG

SEQ ID NO: 364 - protein, 469 aa, Syntrophothermus sp.
ASSRREQRQQKIPSGSYPQKEAVNPQGAGEAPSSLPAQTTGTTREANRTNLMEMVVERENMIRALKRVEANKGAAGVDGMKVEDLREYLKESWPEIREQLLAGTYHPKPVRRVEIPKPDGGVRLLGIPTALDRIIQQALLQILTPTFDPEFSPFSYGFRPYRKAENAVRRAQEYISEGYRWVVDMDLEKFFDRVNHDILMSRVARKVKDKRVLRLIRRYLQAGVMVNGCCVATEEGTPQGGPLSPLLANIMLDDLDRELMRRGHCFVRYADDCNIYVKSQRAGERVMESVKRFVEGELKLKVNLQKSAVDRPWKRKILGFSFTWDKEPRIRLAPKTIKRFKDKIRELTKRSRSQSMEDRIGALNTYLMGWIGYFKLADTRSVLQSLDEWVRRRLRMCYLKQWKKPKTKLRNLIVLGIPADWAALISGSRKGYWRLANTPQMNKALGLAFWRNQGLRSLVGRYDQLRFTS

SEQ ID NO: 365 - protein, 420 aa, unidentified
  REGION 1..420: note = Description of Unknown: Leptospiraceae bacterium sequence
EEILADENLQEALQRVCANKGAAGIDGITTTEFHKQMSEEWKETKQRLLLGKYKPKGVRRVEIPKPAGGIRMLGIPTVMDRFIQQAMLQRLTPIFDPEFSKFSYGFRPNKSAHDAVRQAKKYIEEGHKFVVDIDLEKFFDKVNHDILMHLVGKKIRDKRVLRLIGSYLRAGVMTNGVCIPNEEGTPQGGVISPILANIMLNELDKELEARGHKFCRYADDCNIYVKSMKAGERVKASITRFLNKKLKLKVNETKSAVDKPMNRKFLGFTFGNVDSVVIQISSQSLERVKNKIRELTNPMRSVSMEERIKVINRYIIGWLGYYSLIEVPETIESIDGWLRRRMRSCQWQQWKKPKTRIRELIKLGLKESTARKMGYSRKGNWRCSRTPAMHKAMGIKHWKDRGLINLVARYEIYRESWRTA

SEQ ID NO: 366 - protein, 438 aa, Streptococcus sp.; identical to SEQ ID NO: 271

SEQ ID NO: 367 - protein, 385 aa, Tibeticola sediminis
GTANELPLLEQALSDDRLLAGWERVRANAGGPGVDGVTVEQFGGKVLRALAGLRQRVTASHYQALPLRRIEITRPGKAPRVLAVPCVADRVVQSAVALTISPRLDPGFEDFSFGYRPGRSVPRAVQHLAEARDSGLVWVAEADIQSCFDRIPWAALLQRLGEVLPDAGLLALIQHWLSLPLQWPDGHQQVRCMGVPQGSPLSPLLSNVFLDGMDKELAAGPWRVIRYADDFVIAAASREEARRGLAQAARWLRRLGLRLNLDKTRVIHFDQGFSFLGVRFRGRQMSAVQPGAEPWVLPRATQPRPHSPSSKPAQHSRSPAPTARASAPATPPSAQPEPLGPAAPSPNAAASAQPSQPRAADATLQDLQRLSVAPPNEPSPPRLRT

SEQ ID NO: 368 - protein, 331 aa, unidentified
  REGION 1..331: note = Description of Unknown: Candidatus Accumulibacter sp. SK-02 sequence
MSTLPTPSSTDQDSPPPFWTLARLAEALEHVSARQGGAGADEQTLAEFAADAEAQLGLLALQLTQGSYRPAPARLIPVAKPGGGVRELLLPAVRDRIVQSALARYLADLLEPDFGEASHAYRPGHSVATALHRLQALRDGGLVFVAVCDIHHFFDSVDHRRLFSLLDDLPLERRLREQMKTCVRIEVADVQGQGAWSLARGLAQGSPLSPVLANLFLMAFDAACARAGLALVRYADDCVLACASETEAQSALAFAADALENIGLALNTRKSRLASFAEGFEFLGAFCGAEGMLGGRPGEAACLPPTTGPVHEAAAADDERPPSHGHRPRLR

SEQ ID NO: 369 - protein, 598 aa, Butyricicoccus porcorum
MNPTSDILERIAESSKSHTDGVFTRLYRYLLREDIYFTAYKNLYANAGASTKGTDDDTADGFGAKYVSDIIESLRNLEYSPKPVRRIYIPKHNGKLRPLGIPSFRDKLIQDAIRQILEAIYEPIFSDDSHGFRPGRSCHTAFDRIKYGFNGTKWFIEGDIKGCFDNIDHKVLLNILSKKVKDSKLINLIGAFLKAGYMEEWKYFQTYSGTPQGGILSPILANIYLHELDKKVAEIKQRFDSNEPKKYTEEYGGICHRISTLHRKSKNNPDSPDREKWIAEEVELKRQRVKIPVYQDNNKRICYVRYADDFLIGVVGSKEDCVEIKAELKDFLAAELKLELSDEKTKITHSSESARFLGYDVSVRRSQELKRRSDGVKQRTLNGTVMLNAPLKDKIEEFLISNGYGVRTADGRIVPIATKGLRNRSDFEIVSTYNSQMRGICNYYRMASNFPKLDYFVYIMEYSCLKTLASKHQTTMAKARGDRRTGKRWGVPYETKTGTKTLIFLNMTDIRKSRKAKLDNVDAVPKSVSKQNEIKNRLNAGICELCGCDSEPVVVHHVQSLKALKGKSAWERKMRSIRRKTLIVCETCHNKIHNKTFC

SEQ ID NO: 370 - protein, 599 aa, Acidaminococcus intestini
MKPTSEILERMYRNSEEHSDGIYTRLYRYLLREDIYMTAYKNLYANKGAGTEGVDNDTADGFGKEYVNQIIDELKNQTYEPKAVKRVYIPKRNGKMRPLGIPSFRDKLIQDAIRQILEVIYEPVFSTHSHGFRPNRSCHSALKEISRSFRSTKWFVEGDIKGCFDNIDHTVLLNLLSEKIKDSKFINLIGKFLKAGYMDNWEYHKTYSGTPQGGILSPILANIYLHELDKKVEAMQKEFNAPADYAYTPAYGKKVRGIVKLQKRYGECVDEAEKKELLKQIHKLEVEKRRLPYKDASDKKIAYVRYADDFIIGVSGSREDAERIKQELTLFVATRLKLELSDEKTKITHSSGNAHFLGYDINVRRCQESKRKTNGVLQRTLNNSVELLIPMERIEKFMYDREIVIQGKDGKLIPWQRNSMAGLTDLEIVDTYNSQTRGICNYYCIASNFSKLTYFVYLMEYSCLKTLAKKHKTRISGIKRIFKCGKSWGIPYKTKKEKKRMMIVKFSDFKRGTVFDEPSIDTVKNHIHFNTRNSLEARLKACKCELCGAEGDGIAFEIHHINKMKNLKGKEQWEMAMIARKRKTLVVCKECHKKIHHSS

SEQ ID NO: 371 - protein, 597 aa, Anaeromusa acidaminophila
MKPTSEILERMYQNSAKHTNGVYTRLYRYLLREDIYLTAYKKLYANKGAGTKGVDNDTADGFGMEYVHQIIDELKNQTYMPKPVRRTHIPKQNGKMRPLGIPSFRDKLVQDVIRQFLEAIYEPIFSDRSHGFRPNRSCHTALKQISRSFRGAKWFVEGDIKGCFDNIDHAVLLNLLSEKIKDSKFVTLIGKFLKAGYLEAWQYHATYSGTPQGGILSPILANIYLHELDKKVEQLKQDFSRPAEKVRTTIYSTKAREIERVRKLYADCVSDEERKEVLDKIQKLKTEIRTLPYKDATDKKLAYVRYADDFIISVCGTREECEEIKQQLKSFLSEKLKLELSDDKTKITHSSENARFLGYDVNVRRNNECKRKGNGTIQRTLNNSVELLVPFEKIERFMFERKIVKQDKDGTLIPWQRLSMYGLTDLEVLDTYNSQTRGICNYYSLASNFAKLKYFVYLMEYSCLKTLAQKHKTRISAIKRKYKAGHSWGIPYETKNGAKKMMSIKFSDLNKSAIFNGEVDKITHHAHFTNANSLENRLKMKKCELCGADSNTTFEIHHINKLKNLKGKEQWERAMIARKRKTLVVCKSCHNGIHHSS

SEQ ID NO: 372 - protein, 598 aa, Faecalibacterium sp.
MKPTIEILTRLQENSKNNHEEVFTKLFRYLLRPDIYYVAYQNLYANNGAATKGVDEDTADGFSEDKVNRIIEALRNGTYEPKPVRRTYIKKKNGKMRPLGLPTFTDKLVQDVIRMVLQAIYEPVFSNYSHGFRPGRSCHTALAQLKHEFIGAKWFVEGDIKGCFDNIDHSVLIGIVGKKVKDARFINLLRLFLKAGYMEEWKYYGTYSGCPQGGIISPILANIYLNELDTFVEKLKKSFDTNTPYTLTPQYRALQNKRANTKQKINRREVGEERDQLIAQYIGLGKELRKTPAKLCNDKKLKYVRYADDFLIAVNGSKEDCEWIKAQLTEFIRGTLKMELSQEKTLITHSNDCARFLGYDVRVRRDQQVKPWKNCKQRTMNNTVELLIPFRDKIEKYLFAKGAVKQRPDNGKLEPVARIGLTRNTDLEIVTTYDAELRGLCNFYYLASNYRNLNYFSYLMEYSCLKTLAWKHKCKLSKIYDKYRIGAKRWGIPYETKSGRKVRKLTKFNEVDGKRCEDAIPTIVTIIAKSRTTIDSRLKACRCELCGYEGKDRKYEVHHVNKVKNLKGKEPWEIVMIAKRRKTLVVCHECHQKIHHGY

SEQ ID NO: 373 - protein, 597 aa, Amphibacillus jilinensis
MKPTMEILTKLQENSKKHHDEVFTRLFRYMLRPDIYFVAYQHLYANRGAGTKGINEETADGFSEKYVEQIIEALRTETYRPKPVRRTYIKKSNGKMRPLGLPTFTDKLVQEVIRMILESVYEPIFSNNSHGFRSGRSCHTALTQIKNQFIGARWFVEGDIKGCFNNIDHTILTKIIGKKIKDARFIKLVHLFLKSGYMENWKYYGTYSGCPQGGIISPILANIYLNELDNFMEKIKQDFDNRTPYQLTAEYKKVMNKRSSLSQKIKRCEAGARRDGFIEEYNNLSQQIYKIPAKLCNDKKLMYVRYADDFLIAVNGNKQDCEWIKAKLTEFIHNDLNMELSQEKTLITHSSICARFLGYDVRIRRSQQIKAWKKTKQRTMNNSVELLIPLEDKIQSFLFSRGIVRQRKDNGKMEPFRRNSLLRQTDLEIVSTYDAELRGICNYYSLAVNYSKLNYFSYLMEYSCLKTLATKHRTKISKIISKCRMANKRWGIPYQTKSGMKRKRLTKIYEIDRKKCEDIFPRAITIYAKGKTTFDDRLKAKVCEVCGRTDSERYEIHHVNKVKNLKGKEPWEQIMIAKRRKTMVVCHECHQKIHHGF

SEQ ID NO: 374 - protein, 599 aa, Clostridioides difficile
MKPTVEILTKLQENSKKHHDEVFTRLYRYLLRPDIYYEAYQHLYSNKGAGTKGITEDTADGFSEKYVERIIELLKAETYLPKPVRRTYIKKSNGKMRPLGLPIFADKLVQEAIRMILEAVYEPVFIDYSHGFRPGRSCHTALAQIKKEFTGARWFIEGDIKGCFDNISHAVLVEVIGRKIKDARFLKLIRSFLKAGYMENWKYHETCSGCPQGGIISPILANIYLNELDQYIMKLKKDFDVTAKAPYTPEYSRIIWKRQRLHNRIKDSEGMEREQLIDEYKSATAQMFKIPAKLCEDKKIKYVRYADDFLIAVNGSRQECEVIKGQLTEFVHNTLKMELSQEKTLITHSNTPARFLGYDVRVRRDQQIKPKGRFKTRSMNNKVELNIPFKDRIEKFLFANGIVEQRKDNGKLEPCKRPQLLNMTDLEIVTVYNAELRGICNYYGIASNFNKLIYFNYLMEYSCLKTLANKHCSKISKVREMYKDGTGEWGIPYQTKKGMKRMYFAKYSDCKGKRFTDIIPQQAKNHSHNTTTFESRLKAKACEICGCTDSDKYEIHHVNKLKNLKGKTKWEQVMIAKRRKTIVVCHKCHMVIHHGGKKE

SEQ ID NO: 375 - protein, 598 aa, Faecalibacterium prausnitzii
MKSTMEILTKLQENSQKNQDEVFTRLYRYLLRPDIYFIAYQHLYSNKGAGTKGVNDDTADGFSEQYVTAIIEALRTGSYEPKPVRRTYIQKKNGKLRPLGLPVFADKLVQEAIRMILEAIYEPIFSIYSHGFRPGRSCHTALAMIKHEFTGAKWFIEGDIKGCFDNIDHSTLIGVLNRKIKDARFLNLIRMFLKSGYMEDWDFHETYSGCPQGGIISPILANVYLNELDRYITQLKKEFDHGYNPRNFTEEYNAIRHKRDALHEKIKKAEGTMREQLIAQHKQLTKQLFRTPAKACTDKRLKYVRYADDFLIAVNGTREECEAIKAKLTDFVRDTLKMELSQEKTLITHSNTPARFLGFDVRVRRDASVKRSGKRKMRTMNNKVELNIPLKDKVETYLLSHSIAKRDRKRLIPIHRPILLNRTDLEIVMIYNAELRGLCNYYAIASNFNKLVYFGYLMEYSCLKTLANKHRSRISKVRYEYRDGTGAWGVPYETKKGKRRMMFAKYSDCKGKDLTEKVPDLAYRYSHNTTSFEERLKAKVCEVCGCTDSDSYEIHHVNKVKNLKGKADWEKVMLAKRRKTIVVCHKCHMRIHHGTKTE

SEQ ID NO: 376 - protein, 595 aa, unidentified
  REGION 1..595: note = Description of Unknown: 1947404.3.peg.615 RT Homolog sequence
MKPTTEILVNISKNSSKNKDEVFTRLYRYMLRPDLYFIAYKNLYANKGASTQGIDNDTADGFSKEKIDRIIQSLSDESYQPKPVRRKYIQKKGNSKKKRPLGIPTFTDKLVQEVLRMILEAVYEPIFSNNSHGFRPEKSCHTALNSIKKEFTGTTWFVEGDIKGCFDNINHHVLVDIIGRKIKDARLIKLVWKFLRAGYIEDWKYHTTYSGSPQGGIISPLLANIYLNELDKFAEKTAKAFYKKRDREHTKEYDAVMNALVLVKYHLKKATGQQKSDLLKQKKRLQRQLRKIPCSSQTDKVMKYVRYADDFIIGVKGDKIDCEKIKKQFADFISQELKMELSEEKTLITHSSQFARFLGYDIRVRRDNTVKPHGTHLQRTMNMKVELCIPFQDKIMPFLFNKSIIRQLKDGTLEPIARKYLYSCTDLEILTAFNAELRGICNYYALASNYNRLRYFAYFMEYSCLKTIAGKHKTTARKIISKYSYDGSWRIPYKTKEGIKYSKFADFMKCKKVTDFDEVIKDYAVMHASTRTTFEDRLSAEVCELCGKINAPLEIHHVNKVKNLKGKDFWEIMMIAKKRKTIAVCKECHHKIHHP

SEQ ID NO: 377 - protein, 596 aa, Enterocloster clostridioformis
MQPTIEILDRIRKNSRDNKEEIFTRLYRYLLRPDLYYLAYKNLYANKGAGTKGVNDDTADGFSKEKVDRIIQSLADGTYTPNPVRRKYIQKKQNSTKKRPLGIPTFTDKLVQEVLRMILESVYEPIFSNNSHGFRPNRSCHTALKSLKREFSGVSWFIEGDIKGCFDNIDHQVLANVINAKIKDARLIQLIWKFLKAGYMEDWQYHATYSGCPQGGIVSPILANIYLNELDKFVEKTAKEFYKSRDRHHTPEYDKVTWQIKKAQKQLKTATGQEKTALLQKIAQLKAVMHKTPCMSKTDKVIKYIRYADDFILGVKGDKADCGRIKRQLSDFISQTLKMELSEQKTLITHSNQYARFLGYDIRVRRDQKLKPHGNHVSRTLNGSVELCIPFADKIMPFLFGKSVIRQLRDGTIEPTARKYIFRCTDLEIVSTYNSELRGICNYYSIASNFNKLQYFEYLMEYSCLKTLAGKHESTSRKMMRKYRDGNGSWGVPYQTKAGIKRRSFARFMDCKNTDLWTDKIIDFAIAHIGSRTSFDDRLSARVCELCGKTNVPLEIHHVNKVKNLKGKQLWELAMIAKKRKTLAVCKDCHHKIHHP

SEQ ID NO: 378 - protein, 597 aa, Anaerotruncus sp.
MQPTTAILDRIMRNSRKNNEEIFTRLYRYMLRPDLYYLAYNKLYRNKGAATKGVDDDTADGFSEEKINRIIQSLADETYMPKPVRREYIPKKRSSTKKRPLGLPSFTDKLVQEVLRMILEAVYEPTFSDFSYGFRPHRDCHTALKALKKEFTGVSWFIEGDIKGCFDNIDHQVLVGVISSKIKDARLIKLIWKFLKAGYMEEWKYHTTYSGCPQGGIISPLLSNIYLNELDKFAEKVARAFYKPRDRVRTPEYAKIQCKKDYAQKLLKTATGQKKVELLKRVKSLKSELRKVPCSSKTDKVMKYIRYADDFIIGVKGDKSDCEHIKRQFSDFISEHLKMELSEEKTLITHSNQYARFLGYDVRVRRDGKVKPTDRCLKRTLNYTVELNVPFADKIMPFLFDKAIIKQTHDGKIEYIARKYLYRCTNLEIIDTYNSELRGICNYYSIASNFTSLNYFAYLMEYSCLKTLAGKHKSTSRKIREQFRTGSGDWGIPYNTAKGQQKYRTFAKYMDCKDSDRFNDVIVECAIRHAGTRTTLEKRLSAGICELCGKTNTPLAMHHVNKVKNLKGKQQWEIVMIAKRRKTLAVCKDCHYKIHHP

SEQ ID NO: 379 - protein, 606 aa, unidentified
  REGION 1..606: note = Description of Unknown: Clostridiales bacterium sequence
MKPTMEILERIKKNSEENKDEVFTRIYRYLLRPDIYFVAYQNLYSNNGASTKGVDDDTADGFSEAKIERIIKCLEDESYQPKPFRRVYIKKPNGKMRPLGIPSFTDKLVQEAVRIILEAIYEPIFMDTSHGFRPNRSCHTALQSVKYEFRGARWFIEGDIKGCFDNINHNVLVSCINKKIKDARFTKLIYKFLKAGFVDDFVYNNTYSGCAQGGIISPILANIYLHELDKFVENLSKEFNEPATEKFTADYRKAQNAMAVTRKKIKKAENADDEVEKAELLKVYKSQRATLLKTPCKSQTDKKLKYVRYADDFIIGVNGSKVDCVRIKQQLSDFISNTLKMELSEEKTLITHSNTYAKFLGYNIRVRRSNTVKPNGRGATQRTMSNGVELAIPLKEKINGFMFKNGIVKQCDNGELEPVCRNDMLRLTDLEIVSGYNAELRGICNYYYMASNFYMLNYFSYLMEYSCLKTLAGKHRCSIGKIKEKFSDHKGKWCIAYETKKGTSYLYLSKYSDCKKGKNATDTRTSMVQIHKNTRSTFESRLKAKCCELCGSTTSNQYEIHHVNKIRNLKGKEPWEIMMLSKRRKTMVVCWECHKKIHNQNFEVKQ

SEQ ID NO: 380 - protein, 603 aa, Ruminococcus callidus
MAEMQPTTEILTRISKNSLNNKDEVFTRLFRYLLREDIWFEAYRNLYANNGASTKGVNDDTADGFSERKIQKITEQLKNGKFNPTPVRRTYIQKKNSDKMRPLGIPTFTDKLVQEAVRMILEAVYEPIFHECSHGFRPNRSCHTALKSLRMKFTGAKWFIEGDIKGCFDNINHDVLIGILNKKIKDARLIQLIQQFLKAGYLEDWIYHRTYSGTPQGGIISPILANIYLHELDKFVENLKEEFDKPSKEKYTLEYRKAKYQTEKARKAIRECDPQDYERKKQLIKNLKAVRSVQLKTPCKSQTDKKIQYIRYADDFILSVNGSREECIEIKKKLSQYISEVLKMQLSDEKTLITHSSNHARFLGYDISVRRNAKIKSKNGGVSLRTLNNKVELLIPLKEKINRFMFDKGVIFQKKDGSLFPTHRSYMIHMSDLEIISTYNSELRGICNYYNLASNYCQLRYFAYLMEYSCLKTLAAKHNTKISKIIAKFKDGKGGWGIPYETKSGKKRCYFAKYSDCKDSKDGTDNISNAAVIYGYSRNTLEERLKAKVCELCGDTNAEYYEIHHVHKVKDLKGKNDWERAMIAKRRKTLVLCRNCHHKVHNQ

SEQ ID NO: 381 - protein, 603 aa, Youngiibacter fragilis
MAEMLPTTEILTRISKNSLKNPNETFTRVFRYMLRPDIWFLAYKNLYANNGASTKGINNDTADGFSEKTISNIIKSLENGEFCPTPVRRTYIAKKSSDKKRPLGIPTFTDKLVQEVLRMVLEAIYEPVFMDCSHGFRPNRSCNTALKSLRLKFTGAKWFVEGDIRGCFDNIDHSVLIRLLNQKIKDERLIQLIYKFLKAGYMEDWTYHRTYSGTPQGGIFSPVLANIYLHELDKFIVNLKNEFDKPSAELYTVEYRKAQWQTVKARKAIKNCDPNNKIQKKQFIKEMKSVRSVQLKTPCKSQTDKKIQYIRYADDFIIAVNGSREDCVEIKNKLSLFISSALKMQLSEEKTLITHSSNYARFLGYDVCIRRNAKVKPKKGGITVRTLNNKVELLIPIKDKLNKFLFNKGIVYQKKDGTLFSTHRTSLIRLSDLEIVSTYNSELRGICNYYSLASNYCQLRYFAYLMEYSCLKTLAAKHNSYISKIINKFQNGKGEWGIPYETKQGPKRCYFAKYSDCKSGKDYTDKITKAAIIYGFSRNTLEERIKAKVCELCGKTNADHYEIHHIHKVKDLKGKADWERAMISKRRKTMVLCRNCHHKIHNQ

SEQ ID NO: 382 - protein, 600 aa, Streptococcus agalactiae
MKPTTEILARISQNSLANKEEVFTKLYRYLLRPDIYFVAYKNLYANNGAATKGVNEDTADGFSEAKIDSIIKALADETYQPMPVRRTYIQKKNNRKKLRPLGIPTFTDKLVQEVLRMILEAVYEPIFLDVSHGFRPKRSCHTALKQLRREFNGTRWFVEGDIKGCFDNINHAVLVGLLSNKIRDARITKLIYKFLKAGYLENWQYHKTYSGTPQGGIISPLLANIYLHELDKFVMKLKSEFDTPGVGQITPEYRELHNEIKRLSHRLTKVTGEEREMVLAEYKPKRQKLMTIPCTAQTDKKLKYVRYADDFLIAVKGNREDCQWIKSKLAEFIGDTLKMELSEDKTLITHSSKCARFLGYDVRVRRSGKIKRGGPGHVKMRTLNGGVELLVPLNDKIRQFVFTKGVAIQKEDGSMFPIHRKYLVGLTDLEIVSVYNAELRGICSYYGMASNFCKLHYFSYLMEYSCLKTLASKHKTSLSKIIDKCNDGTGKWGVPYETKLGSKRRYFANYADCKGKGSATDYISNAAVVYGYAVNTLENRLKAKVCELCGTTESDHYEVHHINKLKNLKGKERWEIAMIAKHRKTLVVCRDCHRSIIHKK

SEQ ID NO: 383 - protein, 599 aa, unidentified
  REGION 1..599: note = Description of Unknown: Eubacteriales sequence
MQPTTEILARISKNSLANKEEIFTKLYRYLLRPDLYFLAYNHLYANNGAATKGANNDTADGFSEVKIANIIKSLSDDTYQPTPVRRIYISKKSDPKKKRPLGIPTFTDKLIQEALRMVLEAVYEPVFLNASHGFRPKRSCHTALTSLKKEFNGTRWFVEGDIKGCFDTIDHATLVGFVNNKIKDARIIKLIYKFLKAGYLEDWQYHKTYSGTPQGGIISPLLANIYLHELDKYVMKLKAEFDAPNTEKITPEYRELHNEIKMLSYYIKKADGTEKERLLAEYKPKRKRLMSIPCTSQTDKKIKYVRYADDFIIGVKGSQEDCQWIKSKLAEFISETLKMELSEEKTLITHSSECARFLGYDVRVRRSGEIKRGGPGNAKKRTLNNHTELLVPLNDKIHKFIFSKGIAIQKIDGTLFPVHRNSLLRLTDLEIVTAYNDELRGLCNYYGMASNFHKMKYLAYLMKYSCLKTLASKHKSSISKVIAMFKDGKGDWGIPYETKAGAKRRYFVNYIDCKEAKNPTDIISNAAVIYGQSVTTLEKRLKARVCELCGTAESDHYEIHHVNKLKNLKGRKQWEIAMLAKRRKTLVVCEKCHHEIHNQ

SEQ ID NO: 384 - protein, 598 aa, Faecalibacterium sp.
MQPTTEILERISKNSLTHKEEVFTRLYRYLLRPDIYYQAYQRLYTNKGASTKGANQDTADGFSEAKIEKIIQSLADETYQPTPVRRTYIAKKNNPKKKRPLGIPTFTDKLVQEALRMILEAIYEPLFLDCSHGFRPKRSCHTALEKLKYQFGGVRWFVEGDIKGCFDNINHEALVGFIGNKIKDARIVKLVYKFLKAGYLEDWVYHKTYSGTPQGGILSPLLANIYLNELDQFVMKLKDEFETPEKGQITPEYRALHNKIKNLCYHIDRKQGVEKERMIAECKVLRKQLLKTPCTAQTDKKLKYIRYADDFIIGVKGSKEDCQWIKSKLAEFIGQTLKMELSEEKTLITHSSQCARFLGFDVRVRRCEKVKRNKKGAKMRTLNNHVELLVPFDDKIHDFIFSKKIAIQKKDGKLFPVHRNSLLRATDLEIVTVYNDELRGICNYYGIASNFCKLKYLSYLMEYSCLKTLAAKHKSKISKVVAMYKDGTGEWGIPYETKKKSKRRYFANYMDCKNAKNPTDQISNAAIIYGQSVTTLEKRLKARVCELCGTTESEHYEIHHINKLKNLKGKEPWEIAMLAKRRKTLVVCERCHHLIHNQ

SEQ ID NO: 385 - protein, 600 aa, Streptococcus equi
MKPTMAILERISKNSMEQKDEVFTRLYRYLLRPDIYYIAYQNLYSNKGAGTKGIDDDTADGFSEKKISTIINSLASESYTPKPVRRTYISKKSSSKLRPLGLPTFTDKLIQEVLRLILEAIYEPIFLDTSHGFRPKRSCHTALKMIKREFGGARWFVEGDIKGCFDNIDHQVLISIIQKKVKDARFIKLIYKFLKAGYMENWNYHKTYSGTPQGGILSPLLANIYLHELDLFVLKLKEQFDNPQKDNITSEYRQAHNELKRLSNRLKKVEGNEKQELLEEYLIKRQRLMTIPCTAQTDKKLKYVRYADDFIISVKGNKKDCHWLKQQLADFINGHLKMTLSPEKTLITHSSNCARFLGYDIRVRRSQAIKRGGSGQVKKRTLNGSVELLIPFKDKIHLFLFNKGIVIQKNDGSYFPVHRKNILTATDLEIVTIYNSELRGICRYYGLTSNFNQLNYFAYLMEYSCLKTLASKHKTSLVKIRAKYKDGFGSWAIPYETKTTKKRMYFTDYTKCKSPSTFTDLKSSVAVTYGYSRTTFESRLKAKKCELCGTTDKQTTYEIHHVNKGKNLKGKEKWEQMMIAKQRKTLVVCHHCHRHVIHNH

SEQ ID NO: 386 - protein, 599 aa, Lactococcus cremoris
MKPTMAILERISKNSQENIDEVFTRLYRYLLRPDIYYVAYQNLYSNKGASTKGILDDTADGFSEEKIKKIIQSLKDGTYYPQPVRRMYIAKKNSKKMRPLGIPTFTDKLIQEAVRIILESIYEPVFEDVSHGFRPQRSCHTALKTIKREFGGARWFVEGDIKGCFDNIDHVTLIGLINLKIKDMKMSQLIYKFLKAGYLENWQYHKTYSGTPQGGILSPLLANIYLHELDKFVLQLKMKFDRESPERITPEYRELHNEIKRISHRLKKLEGEEKAKVLLEYQEKRKRLPTLPCTSQTNKVLKYVRYADDFIISVKGSKEDCQWIKEQLKLFIHNKLKMELSEEKTLITHSSQPARFLGYDIRVRRSGTIKRSGKVKKRTLNGSVELLIPLQDKIRQFIFDKKIAIQKKDSSWFPVHRKYLIRSTDLEIITIYNSELRGICNYYGLASNFNQLNYFAYLMEYSCLKTIASKHKGTLSKTISMFKDGSGSWGIPYEIKQGKQRRYFANFSECKSPYQFTDEISQAPVLYGYARNTLENRLKAKCCELCGTSDENTSYEIHHVNKVKNLKGKEKWEMAMIAKQRKTLVVCFHCHRHVIHKHK

SEQ ID NO: 387 - protein, 599 aa, Lactococcus lactis
MKPTMAILERISKNSQENIDEVFTRLYRYLLRPDIYYVAYQNLYSNKGASTKGILDDTADGFSEEKIKKIIQSLKDGTYYPQPVRRMYIAKKNSKKMRPLGIPTFTDKLIQEAVRIILESIYEPVFEDVSHGFRPQRSCHTALKTIKREFGGARWFVEGDIKGCFDNIDHVTLIGLINLKIKDMKMSQLIYKFLKAGYLENWQYHKTYSGTPQGGILSPLLANIYLHELDKFVLQLKMKFDRESPERITPEYRELHNEIKRISHRLKKLEGEEKAKVLLEYQEKRKRLPTLPCTSQTNKVLKYVRYADDFIISVKGSKEDCQWIKEQLKLFIHNKLKMEFSEEKTLITHSSQPARFLGYDIRVRRSGTIKRSGKVKKRTLNGSVELFIPLQDKIRQFIFDKKIAIQKKDSSWFPVHRKYLIRSTDLEIITIYNSELRGICNYYGLASNFNQLNYFAYLMEYNCLKTIASKHKGTLSKTISMFKDGSGSWGIPYEIKQGKQRRYFANFSECKSPYQFTDKISQAPVLYGYARNTLENRLKAKCCELCGTSDENTSYEIHHVNKVKNLKGKEKWEMAMIAKQRKTLVVCFHCHRHVIHKHK

SEQ ID NO: 388 - protein, 597 aa, unidentified
  REGION 1..597: note = Description of Unknown: 1638786.3.peg.2502 RT Homolog sequence
MNPTSEILERVNKSSSEHHDGVFTRLFRYLLREDIYFAAYQKLYANSGAMTPGSDNDTADGFSAEYVHELIEELRSGKYKPKPVRREYIKKQNGKMRPLGIPSFRDKLLQEAVRMFLEAIYEPLFYDQSHGFRPERSCHTALDQIKTNFRSVKWFIEGDIKGCFDNIDHAVLIKTLEVKIKDSRFINIIRAFLKAGYVEDFQYHTTISGTPQGGIISPILANIYLHELDRKVMKLKEKFDKQSTRHQTPEYLHLAKRRQTLQKKIDRVKGEERELAIKEYKAVCNQKLKTPARMSDDKKLVYCRYADDFLIGISGSREDCEEIKEILREFLSTQYHLELSAEKTKITHSAERVRFLGYDVAVRRSQKIKKKANGVKQRTLNNSVELTVPLEDKIMQFLFKNDIIGQKPNGEIWAVCVPRLRHLSEVDIVNRYNAQIRGICNYYCLAANYDKLNYFRYLMEYSCLKTLASKSNSTTRKIIQKYRHDGKWAIPHEVKGGIKYAKLVSLADCKAGKLMSDKDPWQYKSFDPKKLSQYVRLSAGVCELCGDNSDSCCIYHAGKMKNLKSTTEWGKKMLHMRRKTLIVCPKCFKKIHREQNK

SEQ ID NO: 389 - protein, 596 aa, Aerococcus sp.
MKPTFEILERIEKCSTKYVDGVFTRIYRYLLREDIYHAAYQNLYANKGATTKGIDEDTADGFSNEYVQELINSLKDGSYKAKPVRREYIPKQNGKLRPLGIPTFRDKLLQEVVRMILEAIYEPIFHKNSHGFRPGKSCHTALKQIKTEFTGVVWFIEGDIKGCFDNINHNKLIEILGRKIKDSKFLNIIRQFLKAGYIENWQYNATYSGAPQGSICAPILANIYLNELDKKFDEISTHFDKPSSAYKSPKYHEVDKEMKRLSYWIDNTTDEEERQELIKQYKEQKKSLRTLPCKNKDNKRFTFVRYADDWLVGVCGTKEDCKDLKEEIAKFLDEELKLTLSEEKTLITHSSEKVRFLGYDISVRRNKQVKGHKMKNGKWRQSRTLHMKVALTIPHSDKIEKFMFDKGVIRQKENGEIQPIHRAGLLNLSDSEIVEHYNAEARGLCNYYKLAVDYHTLGYFCYLMEYSCLKTIANKHKTSIRKIINKYKDGKTWSVPYETKAGTKRVKPVKIADCKGGKVEDIIFVRKKFNWKTTIRQRLNAKTCELCGCKNAELYEVHVVKNLKDLGDSNWEQAMKEKRRKTLVVCNKCHKEIHEH

SEQ ID NO: 390 - protein, 599 aa, Streptococcus suis
MKPTSEILERIAKSSTEHKDGVFTRLYRYLLREDIYYAAYQKLYANRGATTKGIDDDTADGFSAHYIKELIHDLENGTYRANPVRREYIPKKNGKMRPLGIPSFRDKLLQEVVRMILEAIYEPVFDDHSHGFRPNRSCHTALRQISSDFTGVVWFIEGDITGCFDNIDHEILIDILARKIKDSKFLNVIRQFLKAGYVENWKYNKTYSGTPQGGIVSPILANIYLNELDKKFNEIKRRFDEPRTSRHEKTPKYREIDNEMKKISYWIDHTDDDEKRKELVKQFKQLKKEIHTIPCHPQTHKKFTFVRYADDWLVGVCGTKEECIALKAEIADFLSKELKLTLSEEKTLITHSSEKVRFIGYDICVRRSQEIKGYKMKNGKWRKSRSLHLKVALTIPHTEKIEKFLFAKKAIIQTNGGALKFKPVHRTALLNLSDSEIVEHYNAEMRGILNYYNLAVDYHTLDYFCYLMEYSCLKTIANKHKTSIRKIVRLYKDGNTWSVPYETKEGTKRVRPIKIADCKRGEASDIVFQRTKFNWKSTIRQRLNAGVCELCGKKHADLYEVHVVRNLNELGNSDWELAMKSKRRKTLVVCSDCHRRIHK

SEQ ID NO: 391 - protein, 597 aa, unidentified
  REGION 1..597: note = Description of Unknown: 1950830.3.peg474 RT Homolog sequence
MKPTSMILERIAKSSTEHKDGVFTRLYRYLLREDIYFAAYQKLYANKGATTKGIDNDTADGFSSKYVNDLIQELKNGTYQANPVRRVYIEKKNGKLRPLGIPSFKDKLLQEVVRMILEAIYEPVFDKNSHGFRPNKSCHTAMKQISSEFTGVIWFIEGDIKGCFDNIDHQILINIIAKKIKDSKFLNIIRQFLKAGYIENWKYNATHSGTPQGGICSPILANIYLNELDNKFREIQGKFNKARTIEEIKTLEYRTIDNEMKRVSYWINHTENEQERNNLIKKYKALQQEIHKVPCHTKNNKKFTFVRYADDWLAGVCGTKEECVMLKAEIAKFLTEELKLTLSEEKTLITHSSQKVRFLGYNINVRRSKEVKGFKMKNGKYRKSRTLHYKVALTIPHKEKIEKFLFSKGVIMQKANGEIKPIHRTVLLNLSDKEILEQYNAEMRGILNYYRLAVDYHTLNYFCYLMEYSCLKTIANKHKSSIRKIIREYKDKNTWSIPYETKTGIKRIRPVKIADCKKGVVNDVIYKRTNFSFKSTIRQRLNARTCELCGQTGNELYEVHTIKNLNELGNLNWEKAMKKMKRKTIIVCKECHNIIHS

SEQ ID NO: 392 - protein, 601 aa, Clostridium innocuum
MKTTCEILERIQKNSTEHKDGVYTRLYRYLLREDIYYVAYQRLYSNKGATNKGATTKGVDNDTADGFGQVYVQELITQLRNGTYKPKPSRRVYIEKSNGKMRPLSIPSFRDKLLQEVVRMFLEAIYEPIFSDYSHGFRPNRSCHSALKQAKIYFTGAKWFIEGDIKGCFDNINHKVLINILERKIKDSKFINIIRLFLTAGYVDDFKYNATYSGCAQGGIISPILANIYLNELDKKILEIKNKFDKPHQAKYTKEYSHIKSKRDYQKSKLKNCDEEQRKEILRTIDDLNKKLRKTPRTPNDDKNIYFIRYADDFLIAVKGNKNDCEIIKKEIHDFLRDELKLTLSEEKTLITHSSNKALFLGYNISIRRSQTVKSVSQNGRKYKQRTLNNSVALTVPFERIEKFMFKRRMIKQIKPKTFRPLHRKGWLYLPDYVIVERYDAELRGILNYYNLAVDYNYLGYFRYLMEYSCLATIAGKHNSSTSKIVSQYRHGKYWGVPYLTNKGEEKIKRLARLKDCKSNACNDTIVKHRYVKATNASIRDRLQTGVCELCGKRIDVPLEVHIVSKLKDLKDDKPWKVVMKSKRRKTLVVCPECHKHIHVE

SEQ ID NO: 393 - protein, 593 aa, Ruminiclostridium josui
MTKPTSDILERIYKNSSEHKDGVYTRLYRYLLRDDIYYLAYQKLYSNKGASTKGIDNDTADGFGKKYVDSLIKELSDGTYTPKPVRREYIKKKNGKMRPLGIPSFRDKLLQEVIRNFLEAIYEPTFSDFSHGFRPKRSCHTALEQAKLYFRGAKWFIEGDIKGCFDDIDHDKLIEILQRKIKDSRFINVIRSFLKAGYMEDWKYHQTYSGCPQGGILSPILANIYLNELDNEIAKIKQAFDKPATRKITPEHSSLSAKLFKRRKKLKSATGEQRTALLSEIHDLEEQYRKTPSKMQDDKKVSYVRYADDFLIAENGSKEDCVRLKEQLAKFLFDEYKLTLSKDKTLITHSSERVRFLGYDISVRRNQEYMTDSRGRKARHLNNTVALSVPFEKIEKHMFEKGFVRQTEAKKFRPLHKKGWLYLPDAEIVERYNAEIRGIVNYYYLASNLYKLQYFAYLMEYSCLATLAGKHNSTIKKIVAKHKQGKDWAIKYKTENGATKEKRIVKLKDCKGKCEDKIVQHRYSVNTNATIRARLQAGICELCGSKDKASYEVHHVPSVKGLDGTSLWEQIMKSKRRKTLVVCEDCHKAIHDD

SEQ ID NO: 394 - protein, 591 aa, Petroclostridium xylanilyticum
MKPTAEILERINKNSNEHKDGVYTRLYRYLLREDIYYSAYQKLYSNKGASTEGIDNDTADGFGKKYVESSIEELSNNTYKPKPVRREYIKKSNGKMRPLGIPSFRDKLLQEVMRRFLEAIYEPIFSDFSHGFRPNRSCHTALKQTLPYFKGARWFIEGDIKGCFDNIDHDKLIEILQRKIKDSKFINIIRSFLKAGYIEDFRYNQTYSGTPQGGILSPILANIYLNELDNKIMEIKQNFDKPATRCVNPTYDEIRGKRYWLQQKLKNATDEEKPVLISRINEYSKKLLKLPYKSQTDKNIAFVRYADDFLIAVRGNKEDCIKIKEQLREFLNDELKLTLSDEKTLITHSSEKVRFLGYDISVRRNQQISTNSLGHKKRQLNGTVELLVPLEKIEKFMFDKGIIRQSKAKKFHPIHRKGWLYLPDQEILERYNAEIRGILNYYHLANNYNKLNYFQYLMEYSCLATLAGKHNSSISKVIDKYKSGKGWAIKYKTEKGKTREKRIVKLQDCKGFCDDNIVRHIYSVNTNATIRARLQAGVCELCGSRGKSNYEVHHVSSVKGLEGNKLWEQIMKIKNRKTLVVCEDCHKAIHS

SEQ ID NO: 395 - protein, 297 aa, unidentified
  REGION 1..297: note = Description of Unknown: 19533 RT Homolog sequence
LERALQQMRERADWRYLQSETQYVPWRAPGVDNMTLAYAADHLDEIITQRLERLSCLPYGPLPAKRYYIEEGSKQRPIAIMTVPDGIVSRALLELVREPLEEPLPPCNFAYLQGIGPQRRVDHITSMVEQYGWVVQLDIRSYFDSIPHDLLYERIDRLIVDPDLLALLWEFVTQPIRENGCDHATTVGVPQGGVISPVLANLYLSPLDEAMLAEGWGYARYADDFVIFTSTKAEARRARDYATEIIAELGLQVHRTGRKQAIIAKDCDGFEFCGHFYKWYGDRVYVAPRRSKIEEVV

SEQ ID NO: 396 - protein, 326 aa, Buchananella hordeovulneris
METSVRHLGELTYPLRASAAFQRQALTGEPDLLTEIAAPDSLLNAWRYVFTRDAKDGYLLQQSQQIAADPDRFVAALSGALLSGRYQPEPQVEVLIPKKGKTSAMRELSIPSIRDRVVERAVLNAIIDRADLLQCSASFAFRRGLGVQAATHEITQLRDSGNRYVLLTDIANYFGRINIADSLRVLQRGLFCSRTLALLRFIAKPRRVVGRRRIRSRGLAQGSCLSPLLANLALTDIDFALADTGVGYVRFADDILLCAPSRTELAASQRLLASLAAHQGLQLNEEKTMHTSFDAGFCYLGVDFTAHQPVTDLHYGVKHTKQPAKV

SEQ ID NO: 397 - protein, 329 aa, Pseudomonas aeruginosa
WFADEPRHTRGGSRMADLYRQVRLMKTLSSAWRVVRASCMQSSSSEIRNEAIEFEADSFRQLKSIQSKLQKKKFEFLPQHGIAKKRPGKSSRPLVIAPIPNRIVQRAILDVLQDNVAYVQEILKVETSFGGIKGKNVALAIAAINKAFSNGVTHYVRSDIPSFFTKVQRAKVVDALAKNIDDVDMVNLFSAAIETTLGNLTDLQRRGLESIFPLSHDGVAQGSPLSPLIANIYLAEFDREMNREGLACIRYIDDFVIMAASEKQVMKGFRAAKAVLRRQGLQVYSPDDDPLKASKGDVRDGFDFLGCYVKPGLVQPSKFARNRLLEKID

SEQ ID NO: 398 - protein, 311 aa, Fischerella sp.
ATYDNFLLAWQRTVNTTSRMIRDELGMKIFAHNLQTNLEYLVQQVKAKDFPYKPLADHKVYVPKPSTTLRTMSLMAVSDVIIYQALVNIIADKAYSYLVTHENQCVLGNIYSGPGKRWMLRPWKKQYTRFVDCIENLYHAGNPWIASTDIVAFYDTIDHARLLSLIRKYCGDDQQFQELLQECLAKWAVHNSNITMGRGIPQGSNASDFLANLFLYEIDKEMIVNGYHYIRYVDDVRILASDKSTVQRGLILFDLELKRAGLVAQVTKTSVHEIEDIETEISRLRFIITAPTRNGNCLLVTLPSLPKSEQA

SEQ ID NO: 399 - protein, 324 aa, Arthrobacter sp.
DAEYLKSVWKSDIRPLLRQAKFSNSRYAIDPLHYAAYEWNLDAFVDGIVRDLKLHQFTPERGEVIRAAKGTGLTRPVCELSPRDALVYTAIVKRVEDQLLVSSRKWVGHTRSDKGSSVETGDGAVDSFDWFQFWLRRQGLIADILEIDGVKFIVESDISNFFPSIRLEHVREHLLAHTRLSKELVRLCMQMIDGVLPRSNYLDYSHLGLPQGNNDSSRAIAHSFLAPIDQEFDVEGLAGRYTRYMDDVLYGVRHVAEGEKIISRLQRSLESLALTPNSAKTKIVPVDEYLRDSMVESNAEIERIQSLLESSGALGGSTEPEAKL

SEQ ID NO: 400 - protein, 281 aa, Prevotella sp.
AVWENIVEAERISTNRKMRNPGVIRHIGNRWRNLIEIQQFVLNGTMRTDEYQHEQRVSGQDKLRDIAKLHFHPSHIQHQLITMAGNRRIDRSLIRHTYASRKGYGQILCATEMKKSLSKYRRTERWYGQGDVCKYYDNIPHSLIREDLERLFKDKKFVDTFMEPFERFAPEGKGIPLGIRPSQSIGNLTLKDFDHFMTEENKCADYKRYLDDFMFTGATKGEVKRKMKRAIKYLHDLGFNTHEPKIHRISEGMDMLGFVYYGVKNDMWWRKSDKKRWLRHR

SEQ ID NO: 401 - protein, 326 aa, Gimesia maris
AYDYYLHRKEKRDQKSGKSSNVITLKQIADHEYLLYCFQELRRYGGLGAGKDDISYFDISTSDCAKVFRKLSESLLRGRYRPQFPRKVPIPKPGTDEKRTLKINSIFDRSVSMALDKTLAPQLEKLFLEGSYGNRTNRSPWKMLAQLKKTVEETGRWVLAIEDIRKAFDNVKVKDIVKTHQQAQLELKEKHGIKINDSVVNLISTIAKGVTQKRKKGIDQGSNYSPQSLNVLLHYIHDVPLNAEVAFPLWYRYVDNLTYLCKSVSEGQRVLIKVRQVLNSASLKLKGEDGIVDLRKTTSSLLGFKLRRSNNQLIYLIAPRSWENLK

SEQ ID NO: 402 - protein, 319 aa, Thermoanaerobacterium sp.
SYFYKERRGKIYESYYGSIVTYNTTTSKMADSKELFSSFFKARMSLKKEFPYDEIAIKLFEYNLEDNINRFSKEILKGYKFNTDFIGYKVPKNEKDDRQKVMDNIFNTIAGASFLDIIGIVIDREFSSNCCGNRLNKKLNTEYSYEYFWYGWYYKFMKKAFNKVLNKNNYYLKLDIKSFYTNINQNILYDKIIKLIPYKDSRLKEFINSLIKRHIPYVNNGKGLPQGSLTSGFLANLYLDDFDKYFISKTNDGYMRYVDDIFIFGKTEEQIKELGKEAENKLKDLYLEINKEKTSMGDKSSLKNIYYDDKELDDFQKRL

SEQ ID NO: 403 - protein, 307 aa, Methylobacterium sp.
ARLEAEGQHRQAKRLNRMYCKSFDTKLVAATDANKRLPAGQRAKRAELHEIAAGMDLRQTQGTATFRAEPKKKGYRPVVNFDLRGRTAQLVLKRAAKPFIKIRPDQYASDGGQPAACHRIIELAAQGYAWFEEIDVRSFYASIIPEGVTELLGDLPKEMTEANTLAKRVRASFMKTARDIPSDDLCKLRNEVRAGIPQGSALSPLVAEAVMSNVLDQATQGADWPDVQLVVFADNIAVLGRTKADVEDAAENLAGAFSRSQLGPFNLHRKPARSINQGFDFLSTRFIARNRRIRAEVAPAARLKRIH

SEQ ID NO: 404 - protein, 393 aa, Photorhabdus sp.
MPKGFSFKDTFTPIQRKESLIGLLGIKDIEKFESLLRDGVENAYYIKPPIKKKNGGERIVYAPNRMLKSILRKINNRIFNQINFPDYLYGSIPDKENPRDYILCAHQHCKAKILIKLDIENFFPTMKTKFVFNIFKDLFKFSDEVSNILTKLTTYDGFVPQGAPTSTYLANLYFYDCEPNKVNYLRSLGFRYTRLIDDITVSRLKKEGDWKFVETIISEFITQKELSVNKDKTQLLSANSPQSFKVHGLCIEETTPRFTKNERINIKTQVKRVVKTGYNRDNIRMQKNYHDVYFSVKGKITKLKRVNCPDYPLLKKLLAKHCDPLPEHKEIKRINRVISNLSKDHATFGSTERYRSRYFQVIFRLEILKKLYPVEANEFKARLKLISPIKNEN

SEQ ID NO: 405 - protein, 263 aa, Acinetobacter sp.
IYKGSKIDSLDKLSEVLSIDIDELTNVLLLEDEAKYKAGFIKKSNGKLRNIYNPNTSLRKIQRRIKNRIFTQQIEWPDYIFGSIPADEISSNDYVASAEKHCGARALLKLDIEDFFDNITQELVEKIFKNFFKYNDELSKILAQLCCVDGKVPQGGITSSYIASLALFSIEERLFFRLKNKKLIYTRYIDDITISSKNSEYNFDSIIKIVEGQLNSIDLPLNIDKIKVERFSSKALKVHNIRVDLKTPKFDKIEVKNIRAAIH

SEQ ID NO: 406 - protein, 255 aa, Oenococcus oeni
TQLNVDELASFVGTNAQTIQTITNKTTSYYKSFELKKRSGGSRTILAPKQQLLSIQKKIATTLEKIYPVSIYSHGFIYKKGIKTNAEEHLRSTELLNFDIDNFFDNIPEYRIFGIFRYYFNMNNYISGILKELTCVERHLPQGAPSSPILSNIICYKIDKDLGKLARRNHCKYTRYVDDITFSSKRKLPSSIYNRINKSCSNNIVKILSDSGFTINHRKTRLLTKSQRQEVTGITTNKQLNVSKTYIRSTRAMLY

SEQ ID NO: 407 - protein, 331 aa, unidentified
  REGION 1..331: note = Description of Unknown: Deltaproteobacteria bacterium sequence
RWDESKKRRAENKKKREAENKQRREAWDIYRKKTVVHAGEGVSSGLQDVLSDTDALVARGLPVMHCAADVAVMLGLPLPTLRWLTFHRRATALVHYHRFDIPKKTGGRRLISAPKATLKKAQQVVLDNILSRLPTEPEAHGFVAQHSIVTNAACHAGKAVVINVDLKDFFPSIGFRRVRGLFQRLGYSGQVATMLGLLCTEPPRIKAELDGKVFHVALGERVLPQGACTSPAITNTICRRLDRRLVGLASKHGFTYSRYADDLTFSGNVPKKAGRLLRSVRAILENEGFAENGKKTRVMRQSRRQEVTGLTVNDKPRVSREQRRELRAILH

SEQ ID NO: 408 - protein, 374 aa, Hungatella hathewayi
LVETFGSINNIKNALLDYFEYYECEKNKELVIMSILIRKELCTLDLASPFEYSIIDVIGSMSYFIEKLKTRVAFHQNYERLRYAPIKRWRARKRFSAYELFGMDIMEMRQMQSLFGYNKKKSVISKNLLINGKKRKIKMYSCTSEGFALRSFHLKLMKQLQKLIELQPYSYAYRKDRSIFMCMNQHIDSKFFLKIDIKDFFNSISKGKMNKILKCHFCYDSKQAYEDNVIRRRSRYLGEYVKEWLGIKEITDICFVNGRLALGMVTSPILSNIYMDFFDERFHDNYPGLIYTRYSDDILISSGKWFDYKSILNFIAKELCYLELEINEHKVGFYKLKQAGDHIKFLGLNIVQGPEENYITVGKQYIKDVCSNIS

SEQ ID NO: 409 - protein, 284 aa, Brucella anthropi
YRSYDIKNIEEVKVRLLQAENYTKSIESSLKFNIAHTKGRALYFPQDYETEIIIRKANTNIKKILGINPVSRNDIIRHLKEILREGVPYVIGRYDIKRFYDNIKISALNQNLDESLSTTYDTRRLVSGFLSSHEALYSSGLPTGISLSATLSELYLRNFDRGIKALPWVRYFARYVDDIIIIAEPRTTAQLMESALISGLPDGLALNSGKDKRYFRKLERDFGGAGPEADFDYLGYRFKVDKILKKSSDCGTLASRKVTVDISEKKVKIRKTRFIYAVHKYLAD

SEQ ID NO: 410 - protein, 312 aa, Leptospira meyeri
KGKKEKKKGAFFSSIEEVKKLKFDFVVSRISAHTKSDLLVEPTGYYDLEWFVKNRRSDLFNVIHSFYSPSKKITLNMPKGNFSYRPVSYLLPMDSLIYLAVTEKLIFYTKDKFSKFVYSNLLNPFDKKEVFSEPVKHWLRMRNTIRSNYKTNSLDKYYSADISGYFENIKIKYLLKKAKFYIGKHEVSYTKYLKKLLEKWQYADSQGLIQPHPASSILGKIYLSPVDSYFSYLGKRYSRYVDEFHIQTDDLSEMLNITIHLNEQLRELGLNLNSKKTIFKIGKDIWDEINENQDFFSAVDYAQRIRKKDELA

SEQ ID NO: 411 - protein, 310 aa, Turneriella parva
SGTPESKQSQPGGRKPPLMCHPAITYDAMCSLAGLQRAQISLIEELKRRGEGSKHALSYEDLTELGALLRSHQYSHRPCRLMTIKVGSKKRDIDSPDWLDRIVQRTYVDTIYPLVQQMACDSSHAYLYKRSIHTALWRLIMNIEHFGYSHVFRTDIESFFDSIPHAEMERVIDLHIRDIELNAFSHELLRVAEGFKNSKVGLPTGWLIPPLWANMLLTPVDARLESAGLKFFRYGDDYGILQRSKQEAEFAQGLLESALKPLGLHLKPGYSHKTYTRKLEDGLIVLGHEIRRINNRLTVAISKNSLAETR

SEQ ID NO: 412 - protein, 278 aa, Bacteroides sp.
CIGDIESAAWRAFRGHSRKPEVRAFQESMSSNCAFLYDSLRDGSWQNLMVYRQLTKTNNNGKVRQIDSPSLVVRIYQHLLLNLLEPHYFRKDNLNGLNCKPGCGITSAIPSRSVIHRLKHIFYDRRDLHYCLTIDQRQCYDHITPKVFRKALKQMVDDKWLVDFAVDVCFVDGRLPIGTPTSPFVHHVVMLEFDYFVKSLSSASVRYADDNFLAFATKEEAQAAKWRIKNWWWFRLGMRAKRGSAVVRPLSEPCDFCGYVFHRVDGMGICDHNKGYVK

SEQ ID NO: 413 - protein, 324 aa, Tetraodon nigroviridis
RAARNNSAPGPNGVPYLVYKRCPKLLARLWKILRVIWRRGKVAHQWRWAEGVWVPKEEKSTLIEQFRTISLLNVEGKIFFSILSHRLSDFLLKNQYIDSSVQKGGIPGVPGCLEHCGVVTQLIREAREGRGSLAVLWLDLANAYGAIPHKLVEMALARHHVPCSIKTLIMDYYDSFHLRFVTSGSVTSEWHRLEKGIITGCTISVIIFALAMNMLAKSAEPECRGPITKSGIRQPPIRAFMDDLTVTTTSVPGCRWILQGLERLMTWARMRFKPGKSRSLVLKAGKVTDRFRFYLGGTQIPSVSEKPVKSLGKMFDGSLKYAFS

SEQ ID NO: 414 - protein, 338 aa, Bacteroides stercoris
QVDWDEINEMLYERQWQKLGRGASTKTRIAQDKTIIDLREMSVNGTRLNLDTALKNLRRDMIDDWFFDPLQYVDLCNQDFVLDYFSSQDVREHYKFQEMEVLYIPKESLVQRKAMVGNFVDRLLYIAIVEKLAPLMEEYISSRVYAARLNRSEDNSLIANGVNQWIKMNYLIDEWLEKGVGCLFKCDVVNYFDNISHATLIGFLREIATDADALNAIKMLEQMFSEISDSQTNCGLPQNSDASSLLATFYLSHVDIQIQAQAIEYCRFMDDIYFMAPDYFSARNVLQSLEGELRRLNLCLNSSKVVCITLENKKEVDEFREGLSLYNHTNQKIKQLIR

SEQ ID NO: 415 - protein, 357 aa, unidentified
  REGION 1..357: note = Description of Unknown: Candidatus Magnetoovum chiemensis sequence
IAFIHPKNNEKANAHWEYYRDFLHDTDRFAESIATIPLDEFKLLYEKAYWHQKIEFPAIDYIWRTIQGASNDKIEYLEYSLNYAFQSWYSGKFIDKGLEYSIPKQNPKKERRKVLLSPIDSIVEMKIIADIGPEIENIIDAKFRQGGPVSLGNRLDLKENSLVKKRNLFKYWPKQFRLRYFTILQQIQDKTDGYIVNIDVSDFYPSIPHQEMMKIIEKYLPKLSNFQKHWINDFLKTGEMSKDDGKGIPQGPPLSHVLANLYLYDKLDSKIIHGFLPKFYTRYVDDIVYVASSKKDAETFYKWIDHVINPLVKNKDKSYIVSNSEYLNTYKQHEIIELIRIKVEQVIQKVYLIAKIL

SEQ ID NO: 416 - protein, 275 aa, unidentified
  REGION 1..275: note = Description of Unknown: PE2d497 RT Homolog sequence
KEPDVSLGSTWLSDFPQAWAETGGMGLAVRQAPLIIPLKATSTPVSIKQYPMSQEARLGIKPHIQRLLDQGILVPCQSPWNTPLLPVKKPGTNDYRPVQDLREVNKRVEDIHPTVPNPYNLLSGLPPSHQWYTVLDLKDAFFCLRLHPTSQPLFAFEWRDPEMGISGQLTWTRLPQGFKNSPTLFNEALHRDLADFRIQHPDLILLQYVDDLLLAATSELDCQQGTRALLQTLGNLGYRASAKKAQICQKQVKYLGYLLKEGQRWLTEARKETVM

SEQ ID NO: 417 - protein, 677 aa, Murine leukemia virus
TLNIEDEYRLHETSKEPDVSLGSTWLSDFPQAWAETGGMGLAVRQAPLIIPLKATSSPVSIKQYPMSQEARLGIKPHIQRLLDQGILVPCQSPWNTPLLPVKKPGTNDYRPVQDLREVNKRVEDIHPTVPNPYNLLSGLPPSHQWYTVLDLKDAFFCLRLHPTSQPLFAFEWRDPEMGISGQLTWTRLPQGFKNSPTLFDEALHRDLADFRIQHPDLILLQYVDDLLLAATSENDCQQGTRALLQILGDLGYRASAKKAQICQKQVKYLGYLLKEGQRWLTEARKETVMGQPIPKTPRQLREFLGTAGFCRLWIPGFAEMAAPLYPLTKTGTLFNWGPDQQKAYQEIKQALLTAPALGLPDLTKPFELFVDEKQGYAKGVLTQRLGPWRRPVAYLSKKLDPVAAGWPPCLRMVAAIAVLTKDAGKLTMGQPLVVLAPHAVEALVKQPPDRWLSNARMTHYQALLLDTDRVQFGPVVALNPATLLPLPEEGLRHDCLDILAEAHGTRPDLTDQPLPDADHTWYTDGSSFLQEGQRKAGAAVTTETEVIWAKALPSGTSAQRAELIALTQALKMAEGKKLNVYTDSRYAFATAHIHGEIYRRRGLLTSEGKEIKNKGEILALLKALFLPKRLSIIHCPGHQKGNSAEARGNRMADQAAREIASKETPETSTLLIENSTP

SEQ ID NO: 418 - protein, 677 aa, Murine leukemia virus
TLNIEDEYRLHETSKEPDASLESTWLSDFPQAWAETGGMGLAVRQAPLIIPLKATSTPVSIKQYPMSQEARLGIKPHIQRLLDQGILVPCQSPWNTPLLPVKKPGTNDYRPVQDLREVNKRVEDIHPTVPNPYNLLSGLPPSHQWYTVLDLKDAFFCLRLHPTSQPLFAFEWRDPEMGISGQLTWTRLPQGFKNSPTLFDEALHRDLAGFRIQHPDLILLQYVDDLLLAATSENDCQQGTRALLQILGDLGYRASAKKAQICQKQVKYLGYLLKEGQRWLTEARKETVMGQPIPKTPRQLREFLGTAGFCRLWIPGFAEMAAPLYPLTKTGTLFNWGPDQQKAYQEIKQALLTAPALGLPDLTKPFELFVDEKQGYAKGVLTQRLGPWRRPVAYLSKKLDPVAAGWPPCLRMVAAIAVLTKDAGKLTLGQPLVVLAPHAVEALVKQPPDRWLSNARMTHYQALLLDTDRVQFGPVVALNPATLLPLPEEGLRHDCLDILAEAHGTRPDLTDQPLPDADHTWYTDGSSFLQKGQRKAGAAVTTETEVIWAKALPSGTSAQRAELIALTQALKMAEGKKLNVYTDSRYAFATAHIHGEIYRRRGLLTSEGKEIKNKGEILALLKALFLPKRLSIIHCPGHQKGNSAEARGNRMADQAAREIASKETPETSTLLIENSTP

SEQ ID NO: 419 - protein, 677 aa, unidentified
  REGION 1..677: note = Description of Unknown: Cas-Br-E murine leukemia virus sequence
TLNIEDEYRLHETSKEPDVSLGSTWLSDFPQAWAETGGMGLAVRQAPLIIPLKATSTPVSIKQYPMSQEARLGIKPHIQRLLDQGILVPCQSPWNTPLLPVKKPGTNDYRPVQDLREVNKRVEDIHPTVPNPYNLLSGLPPSHQWYTVLDLKDAFFCLRLHPTSQPLFAFEWRDPEMGISGQLTWTRLPQGFKNSPTLFDEALHRDLAGFRIQHPDLILLQYVDDLLLAATSELDCQQGTRALLQTLGDLGYRASAKKAQICQKQVKYLGYLLKEGQRWLTEARKETVMGQPIPKTPRQLREFLGTAGFCRLWIPGFAEMAAPLYPLTKTGTLFNWGPDQQKAFQEIKQALLTAPALGLPDLTKPFELFVDEKQGYAKGVLTQKLGPWRRPVAYLSKKLDPVAAGWPPCLRMVAAIAVLTKDAGKLTMGQPLVILAPHAVEALVKQPPDRWLSNARMTHYQALLLDTDRVQFGPVVALNPATLLPLPEEGLQHDCLDILAEAHGTRSDLMDQPLPDADHTWYTDGSSFLQEGQRKAGAAVTTETEVIWARALPAGTSAQRAELIALTQALKMAEGKKLNVYTDSRYAFATAHIHGEIYRRRGLLTSEGKEIKNKDEILALLKALFLPKRLSIIHCPGHQKGNSAEARGNRMADQAAREVATRETPETSTLLIENSTP

SEQ ID NO: 420 - protein, 677 aa, Rauscher murine leukemia virus
TLNIEDEYRLHETSKEPDVSLGSTWLSDFPQAWAETGGMGLAVRQAPLIIPLKATSTPVSIKQYPISQEARLGIKPHIQRLLDQGILVPCQSPWNTPLLPVKKPGTHDYRPVQDLREVNKRVEDIHPTVPNPYNLLSGLPPSHQWYTVLDLKDAFFCLRLHPTSQSLFAFEWRDPEMGISGQLTWTRLPQGFKNSPTLFDEALHRDLADFRIQHPDLILLQYVDDLLLAATSELDCQQGTRALLQTLGDLGYRASAKKAQICQKQVKYLGYLLKEGQRWLTEARKETVMGQPTPKTPRQLREFLGTAGFCRLWIPGFAEMAAPLYPLTKTGTLFNWGPDQQKAYQEIKQALLTAPALGLPDLTKPFELFVDEKQGYAKGVLTQKLGPWRRPVAYLSKKLDPVAAGWPPCLRMVAAIAVLTKDAGKLTMGQPLVILAPHAVEALVKQPPDRWLSNARMTHYQALLLDTDRVQFGPIVTLNPATLLPLPEEGLQHDCLDILAEAHGTRPDLTDQPLPDADHTWYTDGSSFLQEGQRKAGAAVTTETEVIWAKALPAGTSAQRAELIALTQALKMAEGKKLNVYTDSRYAFATAHIHGEIYRRRGLLTSEGKEIKNKDEILALLKALFLPKRLSIIHCPGHQKGNRAEARGNRMADQAAREVATRETPETSTLLIENSTP

SEQ ID NO: 421 - protein, 677 aa, Friend murine leukemia virus
TLNIEDEYRLHETSKGPDVPLGSTWLSDFPQAWAETGGMGLAVRQAPLIIPLRAASTPVSIKQYPMSREARLGIKPHIQRLLDQGILVPCQSPWNTPLLPVKKPGTNDYRPVQDLREVNKRVEDIHPTVPNPYNLLSGLPPSHQWYTVLDLKDAFFCLRLHPTSQSLFAFEWRDPEMGISGQLTWTRLPQGFKNSPTLFDEALHRDLADFRIQHPDLILLQYVDDLLLAATSELDCQQGTRALLQTLGDLGYRASAKKAQICQKQVKYLGYLLKEGQRWLTEARKETVMGQPTPKTPRQLREFLGTAGFCRLWIPGFAEMAAPLYPLTKTGTLFKWGPDQQKAYQEIKQALLTAPALGLPDLTKPFELFVDEKQGYAKGVLTQKLGPWRRPVAYLSKKLDPVAAGWPPCLRMVAAIAVLTKDAGKLTMGQPLVILAPHAVEALVKQPPDRWLSNARMTHYQALLLDTDRVQFGPIVTLNPATLLPLPEEGLQHDCLDILAEAHGTRPDLTDQPLPDADHTWYTDGSSFLQEGQRKAGAAVTTETEVIWAKALPAGTSAQRAELIALTQALKMAEGKKLNVYTDSRYAFATAHIHGEIYRRRGLLTSEGKEIKNKEEILALLKALFLPKRLSIIHCPGHQKGNRAEARGNRMADQAAREVATRETPETSTLLIENSAP

SEQ ID NO: 422 - protein, 677 aa, Friend murine leukemia virus
TLNIEDEYRLHETSKGPDVPLGSTWLSDFPQAWAETGGMGLAVRQAPLIIPLKATSTPVSIKQYPMSQEARLGIKPHIQRLLDQGILVPCQSPWNTPLLPVKKPGTNDYRPVQDLREVNKRVEDIHPTVPNPYNLLSGLPPSHQWYTVLDLKDAFFCLRLHPTSQSLFAFEWRDPEMGISGQLTWTRLPQGFKNSPTLFDEALHRDLADFRIQHPDLILLQYVDDLLLAATSELDCQQGTRALLQTLGDLGYRASAKKAQICQKQVKYLGYLLKEGQRWLTEARKETVMGQPTPKTPRQLREFLGTAGFCRLWIPGFAEMAAPLYPLTKTGTLFEWGPDQQKAYQEIKQALLTAPALGLPDLTKPFELFVDEKQGYAKGVLTQKLGPWRRPVAYLSKKLDPVAAGWPPCLRMVAAIAVLTKDAGKLTMGQPLVILAPHAVEALVKQPPDRWLSNARMTHYQALLLDTDRVQFGPIVALNPATLLPLPEEGLQHDCLDILAEAHGTRPDLTDQPLPDADHTWYTDGSSFLQEGQRKAGAAVTTETEVVWAKALPAGTSAQRAELIALTQALKMAEGKKLNVYTDSRYAFATAHIHGEIYRRRGLLTSEGKEIKNKDEILALLKALFLPKRLSIIHCPGHQKGNRAEARGNRMADQAAREVATRETPETSTLLIENSAP

SEQ ID NO: 423 - protein, 677 aa, Friend murine leukemia virus
TLNIEDEYRLHETSKGPDVPLGSTWLSDFPQAWAETGGMGLAFRQAPLIISLKATSTPVSIKQYPMSQEARLGIKPHIQRLLDQGILVPCQSPWNTPLLPVKKPGTNDYRPVQDLREVNKRVEDIHPTVPNPYNLLSGLPPSHQWYTVLDLKDAFFCLRLHPTSQSLFAFEWKDPEMGISGQLTWTRLPQGFKNSPTLFDEALHRDLADFRIQHPDLILLQYVDDLLLAATSELDCQQGTRALLQTLGDLGYRASAKKAQICQKQVKYLGYLLKEGQRWLTEARKETVMGQPTPKTPRQLREFLGTAGLCRLWIPGFAEMAAPLYPLTKTGTLFKWGPDQQKAYQEIKQALLTAPALGLPDLTKPFELFVDEKQGYAKGVLTQKLGPWRRPVAYLSKKLDPVAAGWPPCLRMVAAIAVLTKDVGKLTMGQPLVILAPHAVEALVKQPPDRWLSNARMTHYQALLLDTDRVQFGPIVALNPATLLPLPEEGLQHDCLDILAEAHGTRPDLTDQPLPDADHTWYTDGSSFLQEGQRRAGAAVTTETEVIWAKALPAGTSAQRAELIALTQALKMAAGKKLNVYTDSRYAFATAHIHGEIYRRRGLLTSEGKEIKNKDEILALLKALFLPKRLSIIHCPGHQKGNHAEARGNRMADQAAREVATRETPETSTLLIENSAP

SEQ ID NO: 424 - protein, 677 aa, unidentified
  REGION 1..677: note = Description of Unknown: Xenotropic MuLV-related virus sequence
TLNIEDEYRLHETSKEPDVPLGSTWLSDFPQAWAETGGMGLAVRQAPLIIPLKATSTPVSIKQYPMSQEARLGIKPHIQRLLDQGILVPCQSPWNTPLLPVKKPGTNDYRPVQDLREVNKRVEDIHPTVPNPYNLLSGLPPSHQWYTVLDLKDAFFCLRLHPTSQPLFAFEWRDPEMGISGQLTWTRLPQGFKNSPTLFDEALHRDLADFRIQHPDLILLQYVDDLLLAATSEQDCQRGTRALLQTLGNLGYRASAKKAQICQKQVKYLGYLLKEGQRWLTEARKETVMGQPTPKTPRQLREFLGTAGFCRLWIPGFAEMAAPLYPLTKTGTLFNWGPDQQKAYQEIKQALLTAPALGLPDLTKPFELFVDEKQGYAKGVLTQKLGPWRRPVAYLSKKLDPVAAGWPPCLRMVAAIAVLTKDAGKLTMGQPLVILAPHAVEALVKQPPDRWLSNARMTHYQAMLLDTDRVQFGPVVALNPATLLPLPEKEAPHDCLEILAETHGTRPDLTDQPIPDADYTWYTDGGSFLQEGQRRAGAAVTTETEVIWGGVLPAGTSAQRAELIALTQALKMAEGKKLNVYTDSRYAFATAHVHGEIYRRRGLLTSEGREIKNKNEILALLKALFLPKRLSIIHCPGHQKGNSAEARGNRMADQAAREAAMKAVLETSTLLIEDSTP

SEQ ID NO: 425 - protein, 588 aa, Moloney murine leukemia virus
PHIQRLLDQGILVPCQSPWNTPLLPVKKPGTNDYRPVQDLREVNKRVEDIHPTVPNPYNLLSGLPPSHQWYTVLDLKDAFFCLRLHPTSQPLFAFEWRDPEMGISGQLTWTRLPQGFKNSPTLFDEALHRDLADFRIQHPDLILLQYVDDLLLAATSELDCQQGTRALLQTLGNLGYRASAKKAQICQKQVKYLGYLLKEGQRWLTEARKETVMGQPTPKTPRQLREFLGTAGFCRLWIPGFAEMAAPLYPLTKTGTLFNWGPDQQKAYQEIKQALLTAPALGLPDLTKPFELFVDEKQGYAKGVLTQKLGPWRRPVAYLSKKLDPVAAGWPPCLRMVAAIAVLTKDAGKLTMGQPLVILAPHAVEALVKQPPDRWLSNARMTHYQALLLDTDRVQFGPVVALNPATLLPLPEEGLQHNCLDILAEAHGTRPDLTDQPLPDADHTWYTDGSSLLQEGQRKAGAAVTTETEVIWAKALPAGTSAQRAELIALTQALKMAEGKKLNVYTDSRYAFATAHIHGEIYRRRGLLTSEGKEIKNKDEILALLKALFLPKRLSIIHCPGHQKGHSAEARGNRMADQAARKAAITE

SEQ ID NO: 426 - protein, 676 aa, Murine leukemia virus
TLNLEDEYRLYETSAEPEASPGSTWLSDFPQAWAETGGMGLAVRRRPLIIPLNATSTPVSIKQYPMSQEARLGIKPHIQRLLDQGILVPCQSPWNTPCLPVKKPGTNDYRPVQDLREVNKRVEDIHPTVPNPYNLLSGLPPSHRWYTVLDLKDAFFCLRLHPTSQPLFAFEWRDPGMGISGQLTWTRLPQGFKNSPTLFDEALHRDLADFRIQHPDLILLQYVDDILLAATSELDCQQGTRALLLTLGNLGYRASAKKAQLCQKQVKYLGYLLREGQRCLTEARKETVRGQPTPKTPRQLREFLGTAGFCRLWIPGFAEMAAPLYPLTKTGTLFNWGPDQQKAYQEIKQALLTAPALGLPDLTKPFELFVDEKQGYAKGSLTQKLGPWRRPVAYLSKKLDPVAAGWPPCLRMVAAIAVLRKDAGKLTMGQPLVILAPHADEALVKQPPDRWLSNARMTHYQAMLLDTDRVQFGPVVALNPSTFIPLPEEGAPHDCLEILAETHGTRPDLTDQPIPDADHTWYTDGSSFLQEGQRKAGAAVTTETEVIWARALPAGTSAQRELIALTQALKMAEGKRLNVYTDSRYAFATAHIHGEIYRRRGLLTSEGREIKNKSEILALLKALFLPKRLSIIHCLGHQKGDSAEARGNRLADQAAREAAINTPPDTSTLLIEDSTP

SEQ ID NO: 427 - protein, 677 aa, Murine leukemia virus
TLNIEDEYRLHEISTEPDVSPGSTWLSDFPQAWAETGGMGLAVRQAPLIIPLKATSTPVSIKQYPMSQEAKLGIKPHIQRLLDQGILVPCQSPWNTPLLPVKKPGTNDYRPVQGLREVNKRVEDIHPTVPNPYNLLSGLPTSHRWYTVLDLKDAFFCLRLHPTSQPLFASEWRDPGMGISGQLTWTRLPQGFKNSPTLFDEALHRGLADFRIQHPDLILLQYVDDLLLAATSELDCQQGTRALLKTLGNLGYRASAKKAQICQKQVKYLGYLLREGQRWLTEARKETVMGQPTPKTPRQLREFLGTAGFCRLWIPRFAEMAAPLYPLTKTGTLFNWGPDQQKAYHEIKQALLTAPALGLPDLTKPFELFVDEKQGYAKGVLTQKLGPWRRPVAYLSKKLDPVAAGWPPCLRMVAAIAVLTKDAGKLTMGQPLVILAPHAVEALVKQPPDRWLSNARMTHYQAMLLDTDRVQFGPVVALNPATLLPLPEEGAPHDCLEILAETHGTEPDLTDQPIPDADHTWYTDGSSFLQEGQRKAGAAVTTETEVIWARALPAGTSAQRAELIALTQALKMAEGKRLNVYTDSRYAFATAHIHGEIYKRRGLLTSEGREIKNKSEILALLKALFLPKRLSIIHCLGHQKGDSAEARGNRLADQAAREAAIKTPPDTSTLLIEDSTP

SEQ ID NO: 428 - protein, 677 aa, Murine leukemia virus
TLGIEDEYRLHETSTEPDVSLGSTWLSDFPQAWAETGGMGLAVRQAPLIIPLKATSTPVSIQQYPMSHEARLGIKPHIQRLLDQGILVPCQSPWNTPLLPVKKPGTNDYRPVQDLREVNKRVEDIHPTVPNPYNLLSGLPPSHQWYTVLDLKDAFFCLRLHPTSQPLFAFEWRDPGMGISGQLTWTRLPQGFKNSPTLFDEALHRDLADFRIQHPDLILLQYVDDILLAATSELDCQQGTRALLQTLGDLGYRASAKKAQICQKQVKYLGYLLREGQRWLTEARKETVMGQPVPKTPRQLREFLGTAGFCRLWIPGFAEMAAPLYPLTKTGTLFSWGPDQQKAYQEIKQALLTAPALGLPDLTKPFELFVDEKQGYAKGVLTQKLGPWRRPVAYLSKKLDPVAAGWPPCLRMVAAIAVLTKDAGKLTMGQPLVILAPHAVEALVKQPPDRWLSNARMTHYQAMLLDTDRVQFGPVVALNPATLLPLPEEGAPHDCLEILAETHGTRPDLTDQPIPDADHTWYTDGSSFLQEGQRKAGAAVTTETEVIWAGALPAGTSAQRAELIALTQALKMAEGKRLNVYTDSRYAFATAHIHGEIYRRRGLLTSEGREIKNKSEILALLKALFLPKRLSIIHCLGHQKGDSAEARGNRLADQAAREAAIKTPPDTSTLLIEDSTP

SEQ ID NO: 429 - protein, 677 aa, Murine leukemia virus
TLNLEDEYRLYETSAEPEASPGSTWLSDFPQAWAETGGMGLAVRQAPLIIPLKATSTPVSIKQYPMSQEARLGIKPHIQRLLDQGILVPCQSPWNTPLLPVKKPGTNDYRPVQDLREVNKRVEDIHPTVPNPYNLLSGLPPSHRWYTVLDLKDAFFCLRLHPTSQPLFAFEWRDPGMGISGQLTWTRLPQGFKNSPTLFDEALHRDLAGFRIQHPDLILLQYVDDLLLAATSELDCQQGTRALLQTLGDLGYRASAKKAQICQKQVKYLGYLLKEGQRWLTEARKETVMGQPIPKTPRQLREFLGTAGFCRLWIPGFAEMAAPLYPLTKTGTLFNWGPDQQKAYQEIKQALLTAPALGLPDLTKPFELFVDEKQGYAKGVLTQKLGPWRRSVAYLSKKLDPVAAGWPPCLRMVAAIAVLTKDAGKLTMGQPLVILAPHAEEALVKQPPDRWLSNARMTHYQAMLLDTDRVQFGPVVALNPATLLPLPEEGAPHDCLEILAETHGTRPDLTDQPIPDADHTWYSDGSSFLQEGQRKAGAAVTTETEVIWARALPAGTSAQRAELIALTQALKMAEGKRLNVYTDSRYAFATAHIHGEIYRRRGLLTSEGREIKNKSEILALLKALFLPKRLSIIHCLGHQKGDSAEARGNRLADQAAREAAIKTPPDTSTLLIEDSTP

SEQ ID NO: 430 - protein, 677 aa, Murine leukemia virus
TLNLEDEYRLYETSAEPEVSPGSTWLSDFPQAWAETGGMGLAVRQAPLIIPLKATSTPVSIKQYPMSQEAKLGIKPHIQRLLDQGILVPCQSPWNTPLLPVKKPGTNDYRPVQDLREVNKRVEDIHPTVPNPYNLLSGLPPSHRWYTVLDLKDAFFCLRLHPTSQPLFAFEWRDPGMGISGQLTWTRLPQGFKNSPTLFDEALHRDLADFRIQHPDLILLQYVDDILLAATSELDCQQGTRALLLTLGNLGYRASAKKAQLCQKQVKYLGYLLKEGQRWLTEARKETVMGQPTPKTPRQLREFLGTAGFCRLWIPGFAEMAAPLYPLTKTGTLFNWGPDQQKAYQEIKQALLTAPALGLPDLTKPFELFVDEKQGYAKGVLTQKLGPWRRPVAYLSKKLDPVAAGWPPCLRMVAAIAVLRKDAGKLTMGQPLVILAPHAVEALVKQPPDRWLSNARMTHYQAMLLDTDRVQFGPVVALNPATLLPLPEEGAPHDCLEILAETHGTRPDLTDQPIPDADHTWYTDGSSFLQEGQRKAGAAVTTETEVIWARALPAGTSAQRAELIALTQALKMAEGKRLNVYTDSRYAFATAHIHGEIYRRRGLLTSEGREIKNKSEILALLKALFLPKRLSIIHCLGHQKGDSAEARGNRLADQAAREAAIKTPPDTSTLLIEDSTP

SEQ ID NO: 431 - protein, 678 aa, unidentified
  REGION 1..678: note = Description of Unknown: Recombinant M-MuLV/RaLV retrovirus sequence
TLQLEDEYRLYEPEQDKPKSPEIDSWVTKFPLAWAETGGMGLALQQPPLIIQLKATATPVSIKQYPMSWEAYQGIKPHIRRLLDQGILVPCRSPWNTPLLPVKKPGTGDYRPVQDLREVNKRVEDIHPTVPNPYNLLSTLQTTHTWYTVLDLKDAFFCLRLSPESQPLFAFEWKDSEMGLSGQLTWTRLPQGFKNSPTLFDEALHRDLADFRVQHPTLILLQFVDDLLLGATSETACHQGTESLLQTLGRLGYRASARKAQICQTQVTYLGYQLRDGQRWLTPARKQTVANIPAPRNGRQLREFLGTAGFCRLWIPGFAEMAAPLYPLTKQGVLFQWGAEQQEAFDNIKRALLSSPALGLPDITKPFELFVDEKQGYAKGVLTQRLGPWKRPVAYLSKKLDPVASGWPPCLRMVAAIAVLTKDAGKLTLGQPLTILAPHAVEALIKQPPDCWLSNSRMTHYQALLLDAERVQFGPVVALNPATLLPLPEEAEQHDCLQILAEVHGTRPDLSDRPLQDADHTWYTDGSSYLVNGERKAGAAVTTEDKVIWASALPVGTSAQRAELIALTQALKMAEGKRLNVYTDSRYAFATAHIHGEIYRRRGLLTSEGKDIKNKTEILALLAALFLPKRLSIIHCPGHQKGHSPEARGNRLADVSAREAAMGTQVLSLKDQDQPTSP

SEQ ID NO: 432 - protein, 678 aa, unidentified
  REGION 1..678: note = Description of Unknown: Recombinant M-MuLV/RaLV retrovirus sequence
TLQLEDEYRLYEPEQDKPKSLEIDSWATKFPLAWAETGGMGLALQQPSLIIQLKSTATPSSIKQYPMSWEAYQGIKPHIRRLLDQGILVPCRSPWNMPLLPVKKPGTGDYRPVQDLREVNKRVEDIHPTVPNPYNLLSTLPPTHTWYTVLDLKDAIFCLRLSPESQPLFAFEWKDSEMGLSGQLTWTRLPQGFKNSPMLFDEALHRDLADFRVQHPTLILLQFVDDLLLGATSETACHQGTESLLQTLGRLGYRASARKAQICQTQVTYLGYQLRDGQRWLTPARKQTVANIPAPRNGRQLREFLGTAGFCRLWIPGFAEMAAPLYPLTKQGVLFQWGAEQQEAFDNIKRALLSSSALGLPEITKPFELFVDEKQGYAKGVLTQRLGPWNHPVAYLSKKLDPVASGWPPCLRMVAAIAVLTKDAGKLTLGQPLTILAPHAVEALIKQPPGRWLSNSRMTHYQALLLDAEWVQFGPVVALNPATLLPLTEEAEQHDCLQILAEVHGIRPDLSDRPLQDADHTWYTDGSSYLVNGERKAGAAVTTEDKVIWASALPVGTSAQRAELIALTQALKMAEGKRLNVYTDRHYAFATAHIHGEIYQRRGLLTSEGKDIKNKTEIQALLAALFLPKRLRIIHCPGHQKGHSPEARGNRLADVSAPEAAMGTQVLFLKDQDQPTSP

SEQ ID NO: 433 - protein, 678 aa, unidentified
  REGION 1..678: note = Description of Unknown: Recombinant M-MuLV/RaLV retrovirus sequence
PLQLEDEYRLYEPEQAKPKSLEIDSWVTKFPLAWAETGGMGLALQQPPLIIQLKATATPVSIKQYPMSWEAYQGIKPHIRRLLDQGILVPCWSPWNTPLLPVKKPGTGDYRPVQDLREVNKRVEDIHPAVPNPYNLLSTLPPTHTWYMVLDLKDAFFCLRLSPESQPLFAFEWKDSEMGLSGQLTWTRLPQGFKNSPTLFDEALHRDLADFRVQHPTLILLQFVDDLLLGATSETACHQGTESLLQTLGRLGYRASARKAQICQTQVTYLGYQLRDGQRWLTPARKQTVANIPAPRNGRQLREFLGTAGFCRLWIPGFAEMAAPLYPLTKQGVLFQWGAEQQEAFDNIKRALLSSPALGLPDITKPFELFVDEKQGCAKGVLTQRLGPWKCPVVYLSKKLDPVASGCSPCLRMVAAIAVLTKDAGKLTLGQPLTILAPHAVEALIKQPPDRWLSNSRMTHYQALLLDAEWVQFGPVVALNPATLLPLTEEAEQHDCLQILAEVHGIRPDLSDRPLQDADHTWYTDGSSYLVNGERKAGAAVTTEDKVIWASALPVGTSAQRAELIALTQALKMAEGKRLNVYTDRHYAFATAHIHGEIYQRRGLLTSEGKDIKNKTEIQALLAALFLPKRLRIIHCPGHQKGHSPEARGNRLADVSAPEAAMGTQVLFLKDQDQPTSP

SEQ ID NO: 434 - protein, 676 aa, Feline leukemia virus
TLQLEEEYRLFEPESTQKQEMDIWLKNFPQAWAETGGMGTAHCQAPVLIQLKATATPISIRQYPMPHEAYQGIKPHIRRMLDQGILKPCQSPWNTPLLPVKKPGTEDYRPVQDLREVNKRVEDIHPTVPNPYNLLSTLPPSHPWYTVLDLKDAFFCLRLHSESQLLFAFEWRDPEIGLSGQLTWTRLPQGFKNSPTLFDEALHSDLADFRVRYPALVLLQYVDDLLLAAATRTECLEGTKALLETLGNKGYRASAKKAQICLQEVTYLGYSLKDGQRWLTKARKEAILSIPVPKNSRQVREFLGTAGYCRLWIPGFAELAAPLYPLTRPGTLFQWGTEQQLAFEDIKKALLSSPALGLPDITKPFELFIDENSGFAKGVLVQKLGPWKRPVAYLSKKLDTVASGWPPCLRMVAAIAILVKDAGKLTLGQPLTILTSHPVEALVRQPPNKWLSNARMTHYQAMLLDAERVHFGPTVSLNPATLLPLPSGGNHHDCLQILAETHGTRPDLTDQPLPDADLTWYTDGSSFIRNGEREAGAAVTTESEVIWAAPLPPGTSAQRAELIALTQALKMAEGKKLTVYTDSRYAFATTHVHGEIYRRRGLLTSEGKEIKNKNEILALLEALFLPKRLSIIHCPGHQKGDSPQAKGNRLADDTAKKAATETHSSLTVLPTELIEG

SEQ ID NO: 435 - protein, 675 aa, Baboon endogenous virus
TVSLQDEHRLFDIPVTTSLPDVWLQDFPQAWAETGGLGRAKCQAPIIIDLKPTAVPVSIKQYPMSLEAHMGIRQHIIKFLELGVLRPCRSPWNTPLLPVKKPGTQDYRPVQDLREINKRTVDIHPTVPNPYNLLSTLKPDYSWYTVLDLKDAFFCLPLAPQSQELFAFEWKDPERGISGQLTWTRLPQGFKNSPTLFDEALHRDLTDFRTQHPEVTLLQYVDDLLLAAPTKKACTQGTRHLLQELGEKGYRASAKKAQICQTKVTYLGYILSEGKRWLTPGRIETVARIPPPRNPREVREFLGTAGFCRLWIPGFAELAAPLYALTKESTPFTWQTEHQLAFEALKKALLSAPALGLPDTSKPFTLFLDERQGIAKGVLTQKLGPWKRPVAYLSKKLDPVAAGWPPCLRIMAATAMLVKDSAKLTLGQPLTVITPHTLEAIVRQPPDRWITNARLTHYQALLLDTDRVQFGPPVTLNPATLLPVPENQPSPHDCRQVLAETHGTREDLKDQELPDADHTWYTDGSSYLDSGTRRAGAAVVDGHNTIWAQSLPPGTSAQKAELIALTKALELSKGKKANIYTDSRYAFATAHTHGSIYERRGLLTSEGKEIKNKAEIIALLKALFLPQEVAIIHCPGHQKGQDPVAVGNRQADRVARQAAMAEVLTLATEPDNTSH

SEQ ID NO: 436 - protein, 652 aa, Feline endogenous virus
LQDFPQAWAETGGLGRAKCQVPIIIDLKPTAMPVSIRQYPMSKEAHMGIQPHITRFLELGVLRPCRSPWNTPLLPVKKPGTRDYRPVQDLREVNKRTMDIHPTVPNPYNLLSTLSPDRTWYTVLDLKDAFFCLPLAPQSQELFAFEWRDPERGISGQLTWTRLPQGFKNSPTLFDEALHRDLTDFRTQHPEVTLLQYVDDLLLAAPTKEACIRGTKHLLRELGDKGYRASAKKAQICQTKVTYLGYILSEGKRWLTPGRIETVAHIPPPQNPREVREFLGTAGFCRLWIPGFAELAAPLYALTKESAPFTWQEKHQSAFEALKEALLSAPALGLPDTSKPFTLFIDEKQGIAKGVLTQKLGPWKRPVAYLSKKLDPVAAGWPPCLRIMAATAMLVKDSAKLTLGQPLTVITPHALEAIVRQTPDRWITNARLTHYQALLLDTDRIQFGPPVTLNPATLLPAPEDQQSAHDCRQVLAETHGTREDLKDQELPDADHSWYTDGSSYIDSGTRRAGAAVVDGHHIIWAQSLPPGTSAQKAELIALTKALELSEGKKANIYTDSRYAFATAHTHGSIYERRGLLTSEGKEIKNKAEIIALLKALFLPRKVAIIHCPGHQKGQDPIATGNRQADQVARQVAVAETLTLTTKLEETNL

SEQ ID NO: 437 - protein, 672 aa, Porcine endogenous retrovirus
TLQLDDEYRLFSPPVKLDQNIQFGSTQFPQALAEPAGMGLAKQVPPQVIQLKPSLAPVPVRQSPFSKEAREGIRPHVQRLIQQGIIVPVQSPWNTPLLPVRKPGTNDYRPVQDFERGQKRVQDIHPTVPNPYNLLCALPPQRSWYTVLDLKDAFFCLRLHPTSQPLFAFEWRDPGAGRTGQLTWTRLPQGFKNFPTIFDQALHRDLANFRIQHPQVTLLQYVDDLVLAAATKQDCLQRPKGLLVELSDLGDRAFGYKAHICPTEVTYLGYRLRGRHRWLTEAPQTTVVQIPGPTPAKQVREFLGTVGFCRLWIPGFATLPAPLYPLPKEKGEFSWALQHQKAFDAIKKALLSAPALALPDVTKTLYVDERKGVARGVLTQTLGPWRRPVAYLSKKLDPVASGWPICLKAIAAVAILVKDADKLTLGQNITVIAPHALENIVRQPPDRWMTNARMTHYQSLLLTERVTFAPPAALNPATLLPEETDEPLTHDCHQLLIEETGVRKDLTDIPLTGEPVTWFTDGSSYLVEGNKMAGAAVVDRTPTIWGTNLPERTSSQKGELIGLMQAFRLGQGKSINIYTDSRYAFATAHVHGAIYTQRGLLTSAGREIKNKEEILSLLEALHLPKRLAIIHCPGHQKAKDPISRGNQMADRVAKQAAQGVNLLPMIETPKAP

SEQ ID NO: 438 - protein, 676 aa, Porcine endogenous retrovirus
TLQLDEYRLYSPLVKPDQNIQFWLEQFPKAWAETAGMGLAKQVPPQVIQLKASAAPVSVRQYLLSKEAREGIGPHVQRLIQQGILVPVQSPWNTPLLPVRKPGTNDYRPVQDLREVNKRVQDIHPTVPNPYNLLCALPPQRSWYTVLDLKDAFFCLRLHPTSQPLFAFEWRDPGAGRTGQLTWTRLPQGFKNSPTIFDEALHRDLANFRIQHPQVTLLQYVDDLLLAGATKQDCLEGLLLELFDLGYRASAKKAQICRREATQLGVQVCGAGQSDWLTGKARKKTVQPKIGPPTTAKQVVREFFGAQVGFCRLWIPGFATLAAPLYPLTKEKGEFSWALEHQKAFDAIKKALSSAPALALPDVLKPFTLYVDERKGVARGVLTQILGPWRRPVAYLSKKLDPVASGWPICLKAIAAVAILVKDADKLTLGQNITVIAPHALENIVRQPPDRWMTNARMTHYQSLLLTERVTFAPPAALNPATLLPEETDEPVTHDCHLLIEETGVRKDLTDIPPLTGKMLTWFTDGSSYVVEGKSMAGPPVVTGTRTIWASSLPEGTSAQKAELMALTQALRLAEGKSINIYTDSRYAFATAHVHGAIYKQRGLLTSAGREIKTKEEILSLLEALHLPKRLAIIHCPGHQKAKDPISRGNQMADRVAKQAAQGVNLLPMIETPKAP

SEQ ID NO: 439 - protein, 674 aa, Porcine endogenous retrovirus
TLQLDDEYRLYSPLVKPDQNIQSWLEQFPQAWAETAGMGLAKQVPPQVIQLKASATPISVRQYPLSREAREEIWPHVQRLIQQGILVPVRSPWNTPLLPVRKPGTNDYRPVQDLREVNKRVQDIHPMVPNPYNLLSALPPKRNWYTVLDLKNAFFCLRLHPTSQPLFAFEWRDPGTGRTGQLTWTRLPQGFKNSPTIFDEALHRDLANFRIQHPQVTLLQYVDDLLLAGATKQDCLEGTNALLLELSDLGYRASAKKAQICRREVTYLGYSLRDGQRWLTEARKRTVVQILAPTTAKQVREFLGTAGFCRLWIPGFATLAAPLYPLTKEKGEFSWAPEHQKAFDAIKKALLSAPALALPDVTKPFTLYVDEHKGVARGVLTQSLGPWRRPVAYLSKKLDPVASGWPVCLKAIAAVAILVKDADKSTLGQNITVIAPHALENIVRQPPDRWMTNARMTHYQSLLLTERITFAPPAALNPATLLPEETDEPVTHDCHQLLIEETGVRKDLTDIPLTGEVLTWFTDGSSYVVEGKRMARAAVVDGTRTIWASSLSEGTSAQKAELVALTQALRLAEGKSINIYTDSRYAFATAHVHGAIYKQRGLLTSAGREVKNKEKILSLLEALHLPKRLAIIHCPGHQKAKDLISRGNQMADRVAKQAAQGVNLLPIIETPKAP

SEQ ID NO: 440 - protein, 674 aa, Porcine endogenous retrovirus
TLQLDDEYRLYSPLVKPDQNIQFWLEQFPQAWAETAGMGLAKQVPPQVIQLKASATPVSVRQYPLSKEAQEGIRPHVQRLIQQGILVPVQSPWNTPLLPVRKPGTNDYRPVQDLREVNKRVQDIHPTVPNPYNLLCALPPQRSWYTVLDLKDAFFCLRLHPTSQPLFAFEWRDPGTGRTGQLTWTRLPQGFKNSPTIFDEALHRDLANFRIQHPQVTLLQYVDDLLLAGATKQDCLEGTKALLLELSDLGYRASAKKAQICRREVTYLGYSLRDGQRWLTEARKKTVVQIPAPTTAKQMREFLGTAGFCRLWIPGFATLAAPLYPLTKEKGEFSWAPEHQKAFDAIKKALLSAPALALPDVTKPFTLYVDERKGVARGVLTQTLGPWRRPVAYLSKKLDPVASGWPICLKAIAAVAILVKDADKLTLGQNITVIAPHALENIVRQPPDRWMTNARMTHYQSLLLTERVTFAPPAALNPATLLPEETDEPVTHDCHQLLIEETGVRKDLTDIPLTGEVLTWFTDGSSYVVEGKRMAGAAVVDGTRTIWASSLPEGTSAQKAELMALTQALRLAEGKSINIYTDSRYAFATAHVHGAIYKQRGLLTSAGREIKNKEEILSLLEAVHLPKRLAIIHCPGHQKAKDLISRGNQMADRVAKQAAQGVNLLPIIEMPKAP

SEQ ID NO: 441 - protein, 674 aa, Porcine endogenous retrovirus
TLQLDDEYRLYSPLVKPDQNIQFWLEQFPQAWAETAGMGLAKQVPPQVIQLKASATPVSVRQYPLSKEAQEGIRPHVQRLIQQGILVPVQSPWNTPLLPVRKPGTNDYRPVQDLREVNKRVQDIHPTVPNPYNLLCALPPQRSWYTVLDLKDAFFCLRLHPTSQPLFAFEWRDPGTGRTGQLTWTRLPQGFKNSPTIFDEALHRDLANFRIQHPQVTLLQYVDDLLLAGATKQDCLEGTKALLLELSDLGYRASAKKAQICRREVTYLGYSLRDGQRWLTEARKKTVVQIPAPTTAKQVREFLGTAGFCRLWIPGFATLAAPLYPLTKEKGEFSWAPEHQKAFDAIKKALLSAPALALPDVTKPFTLYVDERKGVARGVLTQTLGPWRRPVAYLSKKLDPVASGWPVCLKAIAAVAILVKDADKLTLGQNITVIAPHALENIVRQPPDRWMTNARMTHYQSLLLTERVTFAPPAALNPATLLPEETDEPVTHDCHQLLIEETGVRKDLTDIPLTGEVLTWFTDGSSYVVEGKRMAGAAVVDGTRTIWASSLPEGTSAQKAELMALTQALRLAEGKSINIYTDSRYAFATAHVHGAIYKQRGLLTSAGREIKNKEEILSLLEALHLPKRLAIIHCPGHQKAKDPISRGNQMADRVAKQAAQGVNLLPMIETPKAP

SEQ ID NO: 442 - protein, 674 aa, Porcine endogenous retrovirus
TLQLDDEYRLYSPLVKPDQNIQFWLEQFPQAWAETAGMGLAKQVPPQVIQLKASAAPVSVRQYPLSKEAREGIRPHVQRLIQQGILVPVQSPWNTPLLPVRKPGTNDYRPVQDLREVNKRVQDIHPTVPNPYNLLCALPPQRSWYTVLDLKDAFFCLRLHPTSQPLFAFEWRDPGAGRTGQLTWTRLPQGFKNSPTIFDEALHRDLANFRIQHPQVTLLQYVDDLLLAGATKQDCLEGTKALLLELSDLGYRASAKKAQICRREVTYLGYSLRGGQRWLTEARKRTVVQIPAPTTAKQVREFLGTAGFCRLWIPGFATLAAPLYPLTKEKGEFSWAPEHQKAFDAIKKALLSAPALALPDVTKPFTLYVDERKGVARGVLTQTLGPWRRPVAYLSKKLDPVASGWPICLKAIAAVAILVKDADKLTLGQNITVIAPHALENIVRQPPDRWMTNARMTHYQSLLLTERVTFAPPAALNPATLLPEETDEPVTHDCHQLLIEETGVRKDLTDIPLTGEMLTWFTDGSSYMVEGKRMAGAAVVDGTRTIWASSLPEGTSAQKAELMALTQALRLAEGKSINIYTDSRYAFATAHVHGAIYKQRGLLTSAGREIKNKEEILSLLEALHLPKRLAIIHCPGHQKAKDPISRGNQMADRVAKQAAQGVNLLPMIETPKAP

SEQ ID NO: 443 - protein, 674 aa, Porcine endogenous retrovirus
TLQLDDEYRLYSSLVKPDQNIQFWLEQFPQAWAETAGMGLAKQVPPQVIQLKASAAPVSVRQYPLSKEAREGIRPHVQRLIQQGILVPVQSPWNTPLLPVRKPGTNDYRPVQDLREVNKRVQDIHPTVPNPYNLLCALPPQRSWYTVLDLKDAFFCLRLHPTSQPLFAFEWRDPGAGRTGQLTWTRLPQGFKNSPTIFDEALHRDLANFRIQHPQVTLLQYVDDLLLAGATKQDCLEGTKALLLELSDLGYRASAKKAQICRREVTYLGYSLRGGQRWLTEARKRTVVQIPAPTTAKQVREFLGTAGFCRLWIPGFATLAAPLYPLTKEKGEFSWAPEHQKAFDAIKKALLSAPALALPDVTKPFTLYVDERKGVARGVLTQTLGPWRRPVAYLSKKLDPVASGWPVCLKAIAAVAILVKDADKLTLGQNITVIAPHALENIVRQPPDRWMTNARMTHYQSLLLTERVTFAPPAALNPATLLPEETDEPVTHDCHQLLIEETGVRKDLTDIPLTGEVLTWFTDGSSYVVKGKRMAGPPVVDGTRTIWASSLPEGTSAQKAELMALTQALRLAEGKSINIYTDSRYAFATAHVHGAIYKQRGLLTSAGREIKNKEEILSLLEALHLPKRLAIIHCPGHQKAKDPISRGNQMADRVAKQAAQGVNLLPMIETPKAP

SEQ ID NO: 444 - protein, 674 aa, Porcine endogenous retrovirus
TPQLDDEYRLYSPQVKPDQDIQSWLEQFPQAWAETAGMGLAKQVPPQVIQLKASATPVSVRQYPLSREAREGIWPHVQRLIQQGILVPVQSPWNTPLLPVRKPGTNDYRPVQDLREVNKRVQDIHPTVPNPYNLLSALPPERNWYTVLDLKDAFFCLRLHPTSQPLFAFEWRDPGTGRTGQLTWTRLPQGFKNSPTIFDEALHRDLANFRIQHPQVTLLQYVDDLLLAGATKQDCSEGTKALLLELSDLGYRASAKKAQICRREVTYLGYSLRDGQRWLTEARKKTVVQIPAPTTAKQVREFLGTAGFCRLWIPGFATLAAPLYPLTKEKGEFSWAPEHQKAFDAIKKALLSAPALALPDVTKPFTLYVDERKGVARGVLTQTLGPWRRPVAYLSKKLDPIASGWPVCLKAIAAVAILVKDADKLTLGQNITIIAPHALENIVRQPPDRWMTNARMTQYQSLLLTERITFAPPAALNPATLLPEETDEPVTHDCHQLLIEETGVRKDLIDIPLTGEVLTWFTDGSSYVVEGKRMAGAAVVDGTRTIWASSLPEGTSAQKAELMALTQALRLADGKSINIYTDSRYAFATAHVHGAIYKQRGLLTSAGREIKNKEEILSLLEALHLPKRLAIIHCPGHQKAKDPISRGNQMADRVAKQAAQGVNLLPIIETPKAP

SEQ ID NO: 445 - protein, 674 aa, Porcine endogenous retrovirus
  MOD_RES 547: note = Any amino acid
TLQLDDEYRLYSPQVKPDQDIQSWLEQFPQAWAETAGMGLAKQVPPQVIQLKASATPVSVRQYPLSREAREGIWPHVQRLIQQGILVPVQSPWNTPLLPVRKPGTNDYRPVQDLREVNKRVQDIHPTVPNPYNLLSALPPERNWYTVLDLKDAFFCLRLHPTSQPLFAFEWRDPGTGRTGQLTWTRLPQGFKNSPTIFDEALHRDLANFRIQHPQVTLLQYVDDLLLAGATKQDCLEGTKALLLELSDLGYRASAKKAQICRREVTYLGYSLRGGQRWLTEARKKTVVQIPAPTTAKQVREFLGTAGFCRLWIPGFATLAAPLYPLTKEKGEFSWAPEHQKAFDAIKKALLSAPALALPDVTKPFTLYVDERKGVARGVLTQTLGPWRRPVAYLSKKLDPVASGWPICLKAIAAVAILVKDADKLTLGQNITVIAPHALENIVRQPPDRWMTNARMTHYQSLLLTERVTFAPPAALNPATLLPEETDEPVTHDCHQLLIEETGVRKDLTDIPLTGEVLTWFTDGSSYVVEGKRMAGAAVVDGTRTIXASSLPEGTSAQKAELMALTQALRLAEGKSINIYTDSRYAFATAHVHGAIYKQRGLLTSAGREIKNKDEILSLLEALHLPKRLAIIHCPGHQKAKDLISRGNQMADRIAKQAAQAVNLLPIIETPKAP

SEQ ID NO: 446 - protein, 674 aa, Porcine endogenous retrovirus
TLQLDDEYRLYSPQVKPDQDIQSWLEQFPQAWAETAGMGLAKQVPPQVIQLKASATPVSVRQYPLSREAREGIWPHVQRLIQQGILVPVQSPWNTPLLPVRKPGTNDYRPVQDLREVNKRVQDIHPTVPNPYNLLSALPPERNWYTVLDLKDAFFCLRLHPTSQPLFAFEWRDPGTGRTGQLTWTRLPQGFKNSPNIFDEALHRDLANFRIQHPQVTLLQYVDDLLLAGATKQDCLEGTKALLLELSDLGYRASAKKAQICRREVTYLGYSLRGGQRWLTEARKKTVVQIPAPTTAKQVREFLGTAGFCRLWIPGFATLAAPLYPLTKEKGEFSWAPEHQKAFDAIKKALLSAPALALPDVTKPFTLYVDERKGVARGVLTQTLGPWRRPVAYLSKKLDPVASGWPVCLKAIAAVAILVKDADKLTLGQNITVIAPHALENIVRQPPDRWMTNARMTHYQSLLLTERVTFAPPAALNPATLLPEETDEPVTHDCHQLLIEETGVRKDLTDIPLTGEVLTWFTDGSSYVVEGKRMAGAAVVDGTHTIWASSLPEGTSAQKAELMALTQALRLAEGKSINIYTDSRYAFATAHVHGAIYKQRGLLTSAGREIKNKEEILSLLEALHLPKRLAIIHCPGHQKAKDLISRGNQMADRVAKQAAQAVNLLPIIETPKAP

SEQ ID NO: 447 - protein, 672 aa, Mus dunni endogenous virus
VLSTEEEYRLHEEQPKGAAPLDWVTAFPNVWAEQAGMGLAKQVPPVVVELKADATPISVRQYPMSKEAKEGIRPHIRRLLDQGILVACQSPWNTPLLPVRKPGTNDYRPVQDLREVNKRVLDIHPTVPNPYNLLSSLPPERTWYTVLDLKDAFFCLRLHPKSQLLFAFEWRDPEGGQTGQLTWTRLPQGFKNSPTLFDEALHRDLAPFRAQNPQLTLLQYVDDLLIAAASKELCQQGTERLLTELGNLGYRVSAKKAQICQTEVIYLGYTLRGGKRWLTEARKKTVMMIPPPTTPRQVREFLGTAGFCRLWIPGFATLAAPLYPLTREGIPFEWKEEHQRAFEAIKSSLMTAPALALPDLTKSFVLYVDERAGIARGVLTQALGPWKRPVAYLSKKLDPVASGWPTCLKAIAAVALLIKDADKLTMGQQVTVVAPHALESIVRQPPDRWMTNARMTHYQSLLLNDRVTFAPPAILNPATLLPLTNDSVPVHRCADILAEEIGTRKDLTDQPWPGAPSWYTDGSSFLIEGKRRAGAAVVDGKKVIWASALPEGTSAQKAELIALTQALREAEGKIINIYTDSRYAFATAHIHGAIYRQRGLLTSAGKDIKNKEEILALLEAIHAPKKVAIIHCPGHQKGEDLVAKGNRMADSVAKQVAQGAMILTEKGNPSKS

SEQ ID NO: 448 - protein, 673 aa, Koala retrovirus
VLNLEEEYRLHEKPVPPSIDPSWLQLFPMVWAEKAGMGLANQVPPVVVELKSDASPVAVRQYPMSKEAREGIRPHIQRFLDLGILVPCQSPWNTPLLPVKKPGTNDYRPVQDLREVNKRVQDIHPTVPNPYNLLSSLPPSHTWYSVLDLKDAFFCLKLHPNSQPLFAFEWRDPEKGNTGQLTWTRLPQGFKNSPTLFDEALHRDLASFRALNPQVVMLQYVDDLLVAAPTYRDCKEGTRRLLQELSKLGYRVSAKKAQLCREEVTYLGYLLKGGKRWLTPARKATVMKIPTPTTPRQVREFLGTAGFCRLWIPGFASLAAPLYPLTREKVPFTWTEAHQEAFGRIKEALLSAPALALPDLTKPFALYVDEKEGVARGVLTQTLGPWRRPVAYLSKKLDPVASGWPTCLKAIAAVALLLKDADKLTLGQNVLVIAPHNLESIVRQPPDRWMTNARMTHYQSLLLNERVSFAPPAILNPATLLPVESDDTPIHICSEILAEETGTRPDLRDQPLPGVPAWYTDGSSFIMDGRRQAGAAIVDNKRTVWASNLPEGTSAQKAELIALTQALRLAEGKSINIYTDSRYAFATAHVHGAIYKQRGLLTSAGKDIKNKEEILALLEAIHLPKRVAIIHCPGHQRGTDPVATGNRKADEAAKQAAQSTRILTETTKNQEHF

SEQ ID NO: 449 - protein, 672 aa, Gibbon ape leukemia virus
VLNLEEEYRLHEKPVPSFVDPSWLQLFPTVWAERTGMGLANQVPPVVVELKSGASPVAVRQYPMSKEAREGIRPHIQKFLDLGVLVPCQSPWNTPLLPVKKPGTNDYRPVQDLREINKRVQDIHPTVPNPYNLLSSLPPSHIWYSVLDLKDAFFCLRLHPNSQPLFAFEWRDPEKGNTGQLTWTRLPQGFKNSPTLFDEALHRDLAPFRALNPQVVLLQYVDDLLVAAPTYEDCKEGTQKLLQELSKLGYRVSAKKAQLCQKEVTYLGYLLKEGKRWLTPARKATVMKIPAPTTPRQVREFLGTAGFCRLWIPGFASLAAPLYPLTKESFPFVWTEEHQKAFDHIKEALLSAPALALPDLTKPFTLYVDERAGMARGVLTQTLGPWRRPVAYLSKKLDPVASGWPTCLKAVAAVALLLKDADKLTLGQKVTVIASHSLESIVRQPPDRWMTNARMTHYQSLLLNERVSFAPPAVLNPATLLPVESEATPVHRCSEILAEETGTRRDLKDQPLPGVSAWYTDGSSFIVEGKRRAGAAIVDGKRTVWASSLPEGTSAQKAELVALTQALRLAKGRNINIYTDSRYAFATAHIHGAIYKQRGLLTSAGKDIKNKEEILALLEAIHLPKQVAIIHCPGHQRGNNPVATGNRRADEAAKQAALSTRVLAEITKLQEP

SEQ ID NO: 450 - protein, 672 aa, Gibbon ape leukemia virus
VLNLEEEYRLHEKPVPSFVDPSWLQLFPTVWAERAGMGLANQVPPVVVELKSGASPVAVRQYPMSKEAREGIRPHIQKFLDLGVLVPCQSPWNTPLLPVKKPGTNDYRPVQDLREINKRVQDIHPTVPNPYNLLSSLPPSHIWYSVLDLKDAFFCLRLHPNSQPLFAFEWRDPEKGNTGQLTWTRLPQGFKNSPTLFDEALHRDLAPFRVLNPQVVLLQYVDDLLVAAPTYEDCKEGTQKLLQELSKLGYRVSAKKAQLCQKEVTYLGYLLKEGKRWLTPARKATVMKIPAPTTPRQVREFLGTAGFCRLWIPGFASLAAPLYPLTKESFPFVWTEEHQKAFDHIKEALLSAPALALPDLTKPFTLYVDERAGMARGVLTQTLGPWRRPVAYLSKKLDPVASGWPTCLKAVAAVALLLKDADKLTLGQKVTVIASHSLESIVRQPPDRWMTNARMTHYQSLLLNERVSFAPPAVLNPATLLPVESEATPVHRCSEILAEETGTRRDLKDQPLPGVSAWYTDGSSFIAEGKRRAGAAIVDGKRTVWASSLPEGTSAQKAELVALTQALRLAKGRNINIYTDSRYAFATAHIHGAIYKQRGLLTSAGKDIKNKEEILALLEAIHLPKQVAIIHCPGHQRGSNPVATGNRRADEAAKQAALSTRVLAETTKPQEP

SEQ ID NO: 451 - protein, 673 aa, Gibbon ape leukemia virus
VLNLEEEYRLHEKPVPSSIDPSWLQLFPTVWAERAGMGLANQVPPVVVELRSGASPVAVRQYPMSKEAREGIRPHIQKFLDLGVLVPCRSPWNTPLLPVKKPGTNDYRPVQDLREINKRVQDIHPTVPNPYNLLSSLPPSYTWYSVLDLKDAFFCLRLHPNSQPLFAFEWKDPEKGNTGQLTWTRLPQGFKNSPTLFDEALHRDLAPFRALNPQVVLLQYVDDLLVAAPTYEDCKKGTQKLLQELSKLGYRVSAKKAQLCQREVTYLGYLLKEGKRWLTPARKATVMKIPVPTTPRQVREFLGTAGFCRLWIPGFASLAAPLYPLTKESIPFIWTEEHQQAFDHIKKALLSAPALALPDLTKPFTLYIDERAGVARGVLTQTLGPWRRPVAYLSKKLDPVASGWPTCLKAVAAVALLLKDADKLTLGQNVTVIASHSLESIVRQPPDRWMTNARMTHYQSLLLNERVSFAPPAVLNPATLLPVESEATPVHRCSEILAEETGTRRDLEDQPLPGVPTWYTDGSSFITEGKRRAGAPIVDGKRTVWASSLPEGTSAQKAELVALTQALRLAEGKNINIYTDSRYAFATAHIHGAIYKQRGLLTSAGKDIKNKEEILALLEAIHLPRRVAIIHCPGHQRGSNPVATGNRRADEAAKQAALSTRVLAGTTKPQEPI

SEQ ID NO: 452 - protein, 672 aa, Gibbon ape leukemia virus
VLSLEEEYRLHEKPVPTSIDPSWLQLFPTVWAERAGMGLANRVPPVVVELKSGASPVAVRQYPMSKEAREGIRPHIQRFLDLGVLVPCRSPWNTPLLPVKKPGTNDYRPVQDLREINKRVQDIHPTVPNPYNLLSSLPPSHTWYSVLDLKDAFFCLKLHPNSQSLFAFEWKDPEKGNTGQLTWTRLPQGFKNSPTLFDEALHRDLALFRAHNPQVKLLQYVDDLLVAAPTYQDCKEGTQKLLQELSKLGYRVSAKKAQLCQKEVTYLGYLLKEGKRWLTPARKATVMKIPAPTTPRQVREFLGTAGFCRLWIPGFASMAAPLYPLTKESIPFIWTEEHQKAFDLIKKALLSAPALALPDLTKPFTLYVDERAGVARGVLTQTLGPWRRPVAYLSKKLDPVASGWPTCLKAVAAVALLLKDADKLTLGQNVTVIASHSLESIVRQPPDRWMTNARMTHYQSLLLNERVSFAPPAVLNPATLLPVESEATPVHRCSEILAEETGTRQDLKDQPLPGVPTWYTDGSSFIAEGKRKAGAAIVDGKRTVWASSLPEGTSAQKAELVALTQALRLAEGRNINIYTDSRYAFATAHIHGAIYKQRGLLTSAGKDIKNKEEILALLEAIHLPKRVAIIHCPGHQKGNDPVATGNRRADEAAKQAALSTRVLAETTKPQEP

SEQ ID NO: 453 - protein, 672 aa, Flying-fox retrovirus
VLGLEEEYRLHEKPVPSSVDPSWLQLFPDVWAEKGGMGLANRVPPIVVELKSDALPVAVRQYPMSREAREGIRPHIQRFLDLGVLVPCQSPWNTPLLPVKKPGTSDYRPVQDLREINKRVQDIHPTVPNPYNLLSSLPPNHTWYSVLDLKDAFFCLKLHPNSQLLFAFEWRDPEKGHTGQLTWTRLPQGFKNSPTLFDEALHRDLASFRASNPQVVLLQYVDDLLVAAPTYKDCKEGTQKLLQELSELGYRVSAKKAQLCQREVTYLGYLLKEGKRWLTPARKATVMEIPTPTTPRQVREFLGTAGFCRLWIPGFASLAAPLYPLTKESTPFLWTEEHRRAFDQIKEALLTAPALALPDLTKPFALYVDERAGVARGVLTQTLGPWRRPVAYLSKKLDPVASGWPTCLKAVAAVALLLKDADKLTLGQSVTVIASHSLESIVRQPPDRWMTNARMTHYQSLLLNERVSFAPPAVLNPATLLPAESGAAPVHECSEILAEETGTRQDLTDQPLPGVPAWYTDGSSFITEGKRRAGAAIVDGKRTVWMSSLPEGTSAQKAELIALTQALRLADGKDINIYTDSRYAFATAHIHGAIYRQRGLLTSAGKEIKNKEEILALLEAIHLPKRVAIIHCPGHQKGNDPVAIGNRRADEAAKQAALAVRVLAETIEPQGQ

SEQ ID NO: 454 - protein, 672 aa, Hervey pteropid gammaretrovirus
VLNLEEEYRLHEKPAPPSIDPFWLQLFPNVWAEQGGMGLANQVPPVVVELKSDASPVAVRQYPMSKEAREGIRPHIQRFLDLGVLVPCQSPWNTPLLPVKKPGTNDYRPVQDLREINKRVQDIHPTVPNPYNLLSSLPPSHTWYSVLDLKDAFFCLKLHPNSQLLFAFEWRDPEKGHTGQLTWTRLPQGFKNSPTLFDEALHRDLASFRASNPQVILLQYVDDLLVAAPTYEDCKEGTQKLLQELSELGYRVSAKKAQLCQKEVTYLGYLLKEGKRWLTPARKATVMRIPTPITPRQVREFLGTAGFCRLWIPGFASLAAPLYPLTKESVPFLWTEEHQRAFDHIKEALLTAPALALPDLTKPFALYVDEKAGVARGVLTQTLGPWRRPVAYLSKKLDPVASGWPTCLKAVAAVALLLKDADKLTLGQNVTVIASHSLESIVRQPPDRWMTNARMTHYQSLLLNERVSFAPPAVLNPATLLPAESEAALVHDCSEILAEETGTRQDLTDQPLPGVPAWYTDGSSFIAEGKRRAGAAIVDNKRTVWMSSLPEGTSAQKAELIALTQALRLADGKDINIYTDSRYAFATAHIHGAIYRQRGLLTSAGKEIKNKEEILALLEAIHLPRRVAIVHCPGHQKGNDPIALGNRRADEAAKQAALSVRVLAETTGPQGP

SEQ ID NO: 455 - protein, 672 aa, Macroglossus minimus gammaretrovirus
VLNLEEEYRLHEKPVPSSIDPLWLQLFPNVWAEKGGMGLASQVPPVVVELKSDASPVAVRQYPMSREAQEGIRPHIQRFLDLGVLVPCQSPWNTPLLPVKKPGTNDYRPVQDLREVNKRVQDIHPTVPNPYNLLSSLPPSHTWYTVLDLKDAFFCLKLHPNSQPLFAFEWRDPEKGHTGQLTWTRLPQGFKNSPTLFDEALHRDLASFRASNPQVVLLQYVDDLLVAAPTYEDCKEGTQKLLQELSNLGYRVSAKKAQLCQKEVTYLGYLLKEGQRWLTPARKATVMGIPTPTTPRQVREFLGTAGFCRLWIPGFASLAAPLYPLTKESTPFLWTEEHQKAFDCIKEALLTAPALALPDLTKPFALYVDERDGVARGVLTQTLGPWRRPVAYLSKKLDPVASGWPTCLKAVAAVALLLKDADKLTLGQNVTVIASHSLESIVRQPPDRWMTNARMTHYQSLLLNERVSFAPPAVLNPATLLPAESEAAPVHTCSEILAEETGTRKDLTDQPLPGVPAWYTDGSSFITEGKRRAGAAIVDSKRTVWMSSLPEGTSAQKAELIALTQALRLANGRDINIYTDSRYAFATAHIHGAIYRQRGLLTSAGKEIKNREEILALLEAIHLPRRVAIIHCPGHQKGNDPVAVGNRRADEAAKQAALSVQVLAEITKPQEL

SEQ ID NO: 456 - protein, 678 aa, unidentified
  REGION 1..678: note = Description of Unknown: Galidia ERV sequence
  MOD_RES 535: note = Any amino acid
TLPLAEEYLLYEGPHDTGDRWLEKWKDELPGVWAETNPPGLAKDRPPIHVQLMSTAQPIRVRQYPMTLEARRGVRENIRKLRAAGILVPCHSPWNTPLLPVRKAETGQYRMVQDLREVNKRVETIHPTVPNPYTLLSLLPPDHIWYSVLDLKDAFFCLPLAPGSQPLFAFEWSDPEEGESGQLTWTRLPQGFKNSPTLFDEALSHDLQSYRTGHPEVTLLQYMDDLIVAARSEAECAQATRDLLETLGDQGYRVSAKKAQLCSQQVTYLGFRLKGGTRTLTESRIKAIVQIPSPKTKRQVREFLGTVGYCRLWIPGFAELAKPLHAVAGGGARPLTWTKTEEEAFQALKSALLQAPALSLPDLEKPFQLFVAENKGVAKGVLTQRIGPWKRPVAYLSRKLDPVAAGWPGCLRAIAAAALLVKEASKLTFGQNLEVTSAHNLESLLRSPPDRWMTNTRVTQYQVLLLDPPRVSFRQTAALNPATLLPEADESLPFHQCEDTLDALTTLRPDLTDRPLLDAEVTLFTDGSSFVDQGXRHAGAAIVTLDSTIWAEALPKGTSAQRAELIALTKALLWGEDKRVNIYTDSRYAFATLHVHGALYKERGLLTTGGKEIKNAPEILALLSSVWKPKKVAVIHCRGHQKNDTNIARGNQRADRVAKEVARGEIAPVLTLQEPNPV

SEQ ID NO: 457 - protein, 678 aa, unidentified
  REGION 1..678: note = Description of Unknown: Echidna ERV sequence
SSPLVEEYRLFVEQPAQNLALLDLWREDIPEVWAESNPPGLATTQVPVHVQLTSTALPIRIRQYPISLEARRSLRGSIRKFKAAGILKPVHSPWNTPLLPVRKTGTSEYRMVQDLREVNKRVETIHPTVPNPYTLLSLLPPDRTWYSVLDLKDAFFCIPLTCQSQLLFAFEWIDIEEGESGQLTWTRLPQGFKNSPTLFDEALSRDLQGYRFDHPTVTLLQYVDDLLIAARSRDECLQATRDLLVTLGSMGYRVSGSKAQLCQEEVTYLGFRIKDGTRTLAQSRVQAILQIPAPKTKKQVREFLGTVGYCRLWIPSFAELAQPLYAATRGADAPLRWTGTEEEAFQRLKTALLQPPALALPNLDKPFQLFVDEAKGVAKGVLMQTLGPWKRPVAYLSRKLDPLAAGWPRCLRAIAAAALLSKEASKLTFEQSLEITSSHNLEGLLRTPPDKWLTNARVTQYQVLLLDPPRVIFKQTAALNPATLLPATDDSLPLHHCADTLDALTTTRPDLTDQPLADAEATLFTDGSSYVKKAEYAGAAVVTTNSIVWAEALPRGTSAQRAELIALTKALEWSRDKTVNIYTDSRYAFATLHVHAMIYKERGLLTAGGKAIKNASEILALLTAIWLPKRVAVIHCRGHQQGESLEALGNRLADKTAREVAKKSPAIQASLCDPPRTP

SEQ ID NO: 458 - protein, 679 aa, Duck infectious anemia virus
  MOD_RES 614: note = Any amino acid
TAPLEEEYRLFLEAPIQNVTLLEQWKREIPKVWAEINPPGLASTQAPIHVQLLSTALPVRVRQYPITLEARRSLRETIRKFRAAGILRPVHSPWNTPLLPVRKPGTSEYRMVQDLREVNKRVETIHPTVPNPYTLLSLLPPDRTWYSVLDLKDAFFCIPLAPESQLIFAFEWTDAEEGESGQLTWTRLPQGFKNSPTLFDEALNRDLQGFRLDHPSVSLLQYVDDLLIAADTQAACLSATRDLLMTLAELGYRVSGKKAQLCQEEVTYLGFKIHKGSRTLSNSRTQAILQIPVPKTKRQVREFLGTIGYCRLWIPGFAELAQPLYAATRGGNDPLEWGEKEEEAFQSLKLALTQPPALALPSLDKPFQLFIEETGGAAKGVLTQTLGPWKRPVAYLSKRLDPVAAGWPRCLRAIAAAALLTREASKLTFGQDIEITSSHNLESLLRSPPDRWLTNARITQYQVLLLDPPRVRFKQTAALNPATLLPETDDTLPIHHCLDTLDSLTSTRPDLTDQPLAQAEATLFTDGSSYIRDGKRYAGAAVVTLDSVVWAEPLPIGTSAQKAELIALTKALEWSKDKSVNIYTDSRYAFATLHVHGMIYKERGLLTAGGKAIXNAPEILALLTAVWLPKRVAVMHCRGHQKDDAPTSAGNRRADEVAREVAIRPLSVQATVSDAPDMP

SEQ ID NO: 459 - protein, 679 aa, Reticuloendotheliosis virus
TAPLEEEYRLFLEAPIQNVTLLEQWKREIPKVWAEINPPGLASTQAPIHVQLLSTALPVRVRQYPITLEARRSLRETIRKFRAAGILRPVHSPWNTPLLPVRKPGTSEYRMVQDLREVNKRVETIHPTVPNPYTLLSLLPPDRTWYSVLDLKDAFFCIPLAPKSQLIFAFEWTDAEEGESGQLTWTRLPQGFKNSPTLFDEALNRDLQGFRLEHPSVSLLQYVDDLLIAADTQAACLSATRDLLMTLAELGYRVSGKKAQLCQEEVTYLGFKIHKGSRTLSNSRTQAILQIPVPKTKRQVREFLGTIGYCRLWIPGFAELAQPLYAATRGGNDPLEWGEKEEEAFQSLKLALTQPPALALPSLDKPFQLFIEETGGAAKGVLTQALGPWKRPVAYLSKRLDPVAAGWPRCLRAIAAAALLTREASKLTFGQDIEITSSHNLESLLRSPPDRWLTNARITQYQVLLLDPPRVRFKQTAALNPATLLPETDDTLPIHHCLDTLDSLTSTRPDLTDQPLAQAEATLFTDGSSYIRDGKRYAGAAVVTLDSVIWAEPLPIGTSAQKAELIALTKALEWSKDKSVNIYTDSRYAFATLHVHGMIYKERGLLTAGGKAIKNAPEILALLTAVWLPKRVAVMHCRGHQKDDAPTSAGNRRADEVAREVAIRPLSIQATVSDAPDMP

SEQ ID NO: 460 - protein, 679 aa, Reticuloendotheliosis virus
TAPLEEEYRLFLEAPIQNVTLLEQWKREIPKVWAEINPPGLASTQAPIHVQLLSTALPVRVRQYPITLEARRSLRETIRKFRAAGILRPVHSPWNTPLLPVRKPGTSEYRMVQDLREVNKRVETIHPTVPNPYTLLSLLPPDRTWYSVLDLKDAFFCIPLAPKSPLIFAFEWTDAEEGESGQLTWTRLPQGFKNSPTLFDEALNRDLQGFRLDHPSVSLLQYVDDLLIAADTQAACLSATRDLLMTLAELGYRVSGKKAQLCQEEVTYLGFKIHKGSRTLSNSRIQAILQIPVPKTKRQVREFLGTIGYCRLWIPGFAELAQPLYAATRGGNDPLEWGEKEEEAFQSLKLALTQPPALALPSLDKPFQLFIEETGGAAKGVLTQALGPWKRPVAYLSKRLDPVAAGWPRCLRAIAAAALLTREASKLTFGQDIEITSSHNLESLLRSPPDRWLTNARITQYQVLLLDPPRVRFKQTAALNPATLLPETDDTLPIHHCLDTLDSLTSTRPDLTDQPLAQAEATLFTDGSSYIPHGKRYAGAAVVTLDSVIWAEPLPIGTSAQKAELIALTKALEWSKDKSVNIYTDSRYAFATLHVHGMIYKERGLLTAEGKAIKNAPEILALLTAVWLPKRVAVMHCRGHQKDDAPTSAGNRRADEVAREVAIRPLSIQATVFDAPDMP

SEQ ID NO: 461 - protein, 679 aa, Reticuloendotheliosis virus
TAPLEEEYRLFLEAPIQNVTLLEQWKREIPKVWAEINPPGLASTQAPIHVQLLSTALPVRVRQYPITLEAKRSLRETIRKFRAAGILRPVHSPWNTPLLPVRKSGTSEYRMVQDLREVNKRVETIHPTVPNPYTLLSLLPPDRIWYSVLDLKDAFFCIPLAPESQLIFAFEWADAEEGESGQLTWTRLPQGFKNSPTLFDEALNRDLQGFRLDHPSVSLLQYVDDLLIAADTQAACLSATRDLLMTLAELGYRVSGKKAQLCQEEVTYLGFKIHKGSRSLSNSRTQAILQIPVPKTKRQVREFLGTIGYCRLWIPGFAELAQPLYAATRGGNDPLVWGEKEEEAFQSLKLALTQPPALALPSLDKPFQLFVEETSGAAKGVLTQALGPWKRPVAYLSKRLDPVAAGWPRCLRAIAAAALLTREASKLTFGQDIEITSSHNLESLLRSPPDKWLTNARITQYQVLLLDPPRVRFKQTAALNPATLLPETDDTLPIHHCLDTLDSLTSTRPDLTDQPLAQAEATLFTDGSSYIRDGKRYAGAAVVTLDSVIWAEPLPIGTSAQKAELIALTKALEWSKDKSVNIYTDSRYAFATLHVHGMIYRERGLLTAGGKAIKNAPEILALLTAVWLPKRVAVMHCKGHQKDDAPTSTGNRRADEVAREVAIRPLSTQATISDAPDMP

SEQ ID NO: 462 - protein, 679 aa, Reticuloendotheliosis virus
TAPLEEEYRLFLEAPIQNVTLLEQWKREIPKVWAEINPPGLASTQAPIHVQLLSTALPVRVRQYPITLEAKRSLRETIRKFRAAGILRPVHSPWNTPLLPVRKSGTSEYRMVQDLREVNKRVETIHPTVPNPYTLLSLLPPDRIWYSVLDLKDAFFCIPLAPESQLIFAFEWADAEEGESGQLTWTRLPQGFKNSPTLFDEALNRDLQGFRLDHPFVSLLQYVDDLLIAADTQAACLSATRDLLMTLAELGYRVSGKKAQLCQEEVTYLGFKIHKGSRTLSNSRTQAILQIPVPKTKRQVREFLGTIGYCRLWIPGFAELAQPLYAATRGGNDPLVWGEKEEGAFQSLKLALTQPPALALPSLDKPFQLFVEETGGAAKGVLTQALGPWKRPVAYLSKRLDPVAAGWPRCLRAIAAAALLTREASKLTFGQDIEITSSHNLESLLRSPPDRWLTNARITQYQVLLLDPPRVRFKQTAALNPATLLPETDDTLPIHHCLDTLDSLTSTRPDLTDQPLAQAEATLFTDGSSYIRDGKRYTGAAVVTLDSVIWAEPLPIGTSAQKAELIALTKALEWSKDKSVNIYTDSRYAFATLHVHGMIYRERGLLTAGGKAIKNAPEILALLTAVWLPKRVAVMHCKGHQKDDAPTSTGNRRADEVAREVAIRPLSTQATISDAPDMP

SEQ ID NO: 463 - protein, 679 aa, Reticuloendotheliosis virus
TAPLEEEYRLFLEAPIQNVTLLEQWKREIPKVWAEINPPGLASTQAPIHVQLLSTALPVRVRQYPITLEAKRSLRETIRKFRAAGILRPVHSPWNTPLLPVRKSGTSEYRMVQDLREVNKRVETIHPTVPNPYTLLSLLPPDRIWYSVLDLKDAFFCIPLAPESQLIFAFEWADAEEGESGQLTWTRLPQGFKNSPTLFDEALNRDLQGFRLDHPFVSLLQYVDDLLIAADTQAACLSATRDLLMTLAELGYRVSGKKAQLCQEEVTYLGFKIHKGSRTLSNSRTQAILQIPVPKTKRQVREFLGTIGYCRLWIPGFAELAQPLYAATRGGNDPLVWGEKEEESFQSLKLALTQPPALALPSLDKPFQLFVEETGGAARGVLTQALGPWKRPVAYLSKRLDPVAAGWPRCLRAIAAAALLTREASKLTFGQDIEITSSHNLESLLRSPPDRWLTNARITQYQVLLLDPPRVRFKQTAALNPATLLPETDDTLPIHHCLDTLDSLTSTRPDLTDQPLAQAEATLFTDGSSYIRDGKRYTGAAVVTLDSVIWAGPLPIGTSAQKAELIALTKALEWSKDKSVNIYTDSRYAFATLHVHGMIYRERGLLTAGGKAIKNAPEILALLTAVWLPKRVAVMHCKGHQKGDAPTSTGNRRADEVAREVAIRPLSTQATISDAPDMP

SEQ ID NO: 464 - protein, 679 aa, Reticuloendotheliosis virus
TAPLEEEYRLFLEAPIQNVTLLEQWKREIPKVWAEIIPPGLASTQAPIHVQLLSTALPVRVRQYPITLEAKRSLRETIRKFRAAGILRPVHSPWNTPLLPVRKSGTSEYRMVQDLREVNKRVETIHPTVPNPYTLLSLLPPDRIWYSVLDLKDAFFCIPLAPESQLIFAFEWADAEEGESGQLTWTRLPQGFKNSPTLFDEALNRDLQGFRLDHPFVSLLQYVDDLLIAADTQAACLSATRDLLMTLAELGYRVSGKKAQLCQEEVTYLGFKIHKGSRTLSNSRTQAILQIPVPKTKRQVREFLGTIGYCRLWIPGFAELAQPLYAATRGGNDPLVWGEKEEEALQSLKLALTQPPALALPSLDKPFQLFVEETGGAAKGVLTQALGPWKRPVAYLSKRLDPVAAGWPRCLRAIAAAALLTREASKLTFGQDIEITSSHNLESLLRSPPDRWLTNARITQYQVLLLDPPRVRFKQTAALNPATLLPETDDTLPIHHCLDTLDSLTSTRHDLTDQPLAQAEATLFTDGSSYIRDGKRYTGAAVVTLGSVIWAEPLPIGTSAQKAELIALTKALEWSKDKSVNIYTDSRYAFATLHVHGMIYRERGLLTAGGKAIKNAPEILALLTAVWLPKRVAVMHCKGHQKDDAPTSTGNRRADEVAREVAIRPLSTQATISDAPDMP

SEQ ID NO: 465 - protein, 766 aa, Simian foamy virus
TTLVPLQDYQERLLKQTAFPEQHRKRLQTLFLKYDALWQHWENQVGHRRIKPHHIATGTVAPRPQKQYPINPKAKPSIQIVINDLLKQGVLIQQNSTMNTPVYPVPKPDGKWRMVLDYREVNKTIPLIAAQNQHSAGILSSIYRGKYKTTLDLSNGFWAHSITPESYWLTAFTWQGKQYCWTRLPQGFLNSPALFTADVVDLLKEIPNVQAYVDDIYISHDDPEEHLEQLEKVFSILLNAGYVVSLKKSEIAQYEVEFLGFNITKEGRGLTETFKQKLLNITPPKDLKQLQSILGLLNFARNFIINFSELVKPLYSIISNAQGKYITWTEENSNQLQHIIDVLNMAENLEERNPETRLIVKVNASPSAGYIRFYNEHSKRPIMYINYVFTKAEIKFTPTEKLLTTIHKALIKALDIAMGQEILVYSPITSMTKIQKTPLPERKALPIRWITWMTYLEDPRIFFHYDKTLPELQQIPAVTEDVVYKTKHPSEFQRVFYTDGSAIKHPDITKSHSAGMGIAETQFSPEFKVLNKWSIPLGDHTAQLAEIAAEEFACKKALKITGPVLIVTDSFYVAESANKELPYWQSNGFLNNKKKPLKHVSKWKSIAECLQLKPDITIIHEKGHQPTATSFHTEGNSLADKLATQGSYVVNTNTTPSLDAELDQLLQGQYPKGYPKHYSYKLQEGHVVVERPNGIRIIPPKADRSTIILQAHNIAHTGRDSTFLKVTSKYWWPNLRKDVVKVIRQCKQCLVTNQAVLTAPPILRPE

SEQ ID NO: 466 - protein, 766 aa, Rhesus macaque simian foamy virus
TVLVPLQDYQERLLKQTTLPKEQKDQLEKLFLKYDALWQHWENQVGHRRIKPHNIATGTLAPRPQKQYPINPKAKPSIQIVIDDLLKQGVLIQQNSTMNTPVYPVPKPDGKWRMVLDYREVNKTIPLIAAQNQHSAGILSSIYRGKYKTTLDLTNGFWAHPITPESYWLTAFTWQGKQYCWTRLPQGFLNSPALFTADVVDLLKEVPNVQAYVDDIYMSHDDPQEHLEQLEKVFSILLNAGYVVSLKKSEIAQREVEFLGFNITKEGRGLTETFKQKLLNVIPPKDLKQLQSILGLLNFARNFIPNYSELVKPLYTIVANANGKFISWTEENSNQLQYIISVLNQADNLEERNPETRLILKVNSSPSAGYIRYYNEGSKRPIMYVNYVFSKAEVKFTQTEKMLTTMHKGLIKAMDLAMGQEILVYSPIVSMTKIQKTPLPERKALPVRWITWMTYLEDPRIQFHYDKTLPELQQTPSVTEDVIAKTKHPSEFAMVFYTDGSAIKHPDINKSHSAGMGIAQVQFQPEYKVIHQWSIPLGDHTAQLAEIAAVEFACKKALKISGPVLIVTDSFYVAESANKELSYWKSNGFLNNKKKPLKHVSKWKSIAECLQLKPDITIIHEKGHQQPMTTLHTEGNNLADKLATQGSYVVHCNTTPSLDAELDQLLQGHNPPGYPKQYKYTLEDNKIIVERPNGQRIVPPKSDREKIISMAHNIAHTGRDATFLKVSSKYWWPNLRKDVVKVIRQCKQCLVTNAANLTSPPILRPE

SEQ ID NO: 467 - skipped

SEQ ID NO: 468 - protein, 768 aa, Western lowland gorilla simian foamy virus
TILVPLQDYQSRILEKTALSEEFKKQLQTLFLKYDNLWQHWENQVCHRKIRPHNIATGDYPPRPQKQYPINPKARSSIQVVIDDLLKQGVLVQQNSTMNTPVYPIPKPDGRWGMVLDYREVNKTIPLIAAQNQHSAGILATIVRKKYKTTLVLANGFWAHPITPESYWLTAFIWQGKQYCWTRLPQGFLNSPALFTADVVDLLKEISNVQAYVDDIYLSHDDPQEHLDQLEKVFQILLQAGYVVSLKKSEVAQKTVEFLGFNITKEGRGLTEAFKAKLLDITPPKDLKQLQSILGLLNFARNFILNFAELVKPLYSLISSAKGKYIEWSNENTVQLQTIIKALNNADNLEERIPEKRLIIKVNTSPSAGYVRYYNETGKKPIMYLNYVFSKAELKFTLLEKLLTTMHKALIKAMDLAMGQEILVYSPVVSMTKIQKTPIPERKALPIRWITWMTYLEDPRIQFHYDKTLPELKNIPDVLTENSSKIMIHPSQYNSVFYTDGSAIRSPDPTKSHNAGMGIVQVKFSPELQVINQWSIPLGNHTAQMAEIAAVEFACKKALKITGPVLIITDSFYVAESTNKELPYWKSNGFVNNKKKPLKHVSKWKSIAECLSLKPDITIQHERGHQPIYTSIHTEGNALADKLATQGSYVVNNNDKKPNLDAELDHLIQGKYPKGYPKQYTYYMEDGKVKVNRPEGTKIIPPSLERAGIVQKAHNLAHTGREATLLKIANLYWWPNMRKDVVRQLGRCQQCLVTNAFNQTSGPILRPT

SEQ ID NO: 469 - protein, 767 aa, Eastern chimpanzee simian foamy virus
TILVPLQEYQEKILSKTALPEDQKQQLKTLFVKYDNLWQHWENQVGHRKIRPHNIATGDYPPRPQKQYPINPKAKPSIQIVIDDLLKQGVLTPQNSTMNTPVYPVPKPDGRWRMVLDYREVNKTIPLTAAQNQHSAGILATIVRQKYKTTLDLANGFWAHPITPESYWLTAFTWQGKQYCWTRLPQGFLNSPALFTADVVDLLKEIPNVQVYVDDIYLSHDDPKEHVQQLEKVFQILLQAGYVVSLKKSEIGQKTVEFLGFNITKEGRGLTDTFKTKLLNITPPKDLKQLQSILGLLNFARNFIPNFAELVQPLYNLIASAKGKYIEWSEENTKQLNMVIEALNTASNLEERLPEQRLVIKVNTSPSAGYVRYYNETGKKPIMYLNYVFSKAELKFSMLEKLLTTMHKALIKAMDLAMGQEILVYSPIVSMTKIQKTPLPERKALPIRWITWMTYLEDPRIQFHYDKTLPELKHIPDVYTSSQSPVKHPSQYEGVFYTDGSAIKSPDPTKSNNAGMGIVHATYKPEYQVLNQWSIPLGNHTAQMAEIAAVEFACKKALKIPGPVLVITDSFYVAESANKELPYWKSNGFVNNKKKPLKHISKWKSIAECLSMKPDITIQHEKGHQPTNTSIHTEGNALADKLATQGSYVVNCNTKKPNLDAELDQLLQGHYIKGYPKQYTYFLEDGKVKVSRPEGVKIIPPQSDRQKIVLQAHNLAHTGREATLLKIANLYWWPNMRKDVVKQLGRCQQCLITNASNKASGPILRPD

SEQ ID NO: 470 - protein, 767 aa, Spider monkey simian foamy virus
TIKLPVQDLKNTLVSQANIGKEDKIKLAKLLDKYDDLWQQWDNQVGNRKITPHNIATGTYPPKPQKQYHINPKAKPSIQIVINDLLKQGVLRQSTSPMNTPVYPVPKPDGKWRMVLDYRAVNKTIPLIAAQNQHSLGILTNLIRHKYKSTIDLSNGFWAHPITEDSQWITAFTWEGKQHVWTRLPQGFLNSPALFTADVVDILKEVPGVSVYVDDIYISSPTMEEHFQVLDSIFRKLLETGYIVSLKKSALARYEVNFLGFVISETGRGLTSEFRERLQEITPPTTLKQLQSILGFLNFARNFVPNFSELVQPLYQLISTASGNFIQWTAEHTLRLNELISALNHAGNLEQRRGDSPLVVKVNASDKTGYIRYYNDNSLIPIAYASHVFSTAELKFTPLEKLLVTMHRALLKGIDLALGQPIKVYSPIASMQKLQKTPIPERKALSTRWVTWLSYLEDPRITFYYDKTLPDLKHVPASTDNNIITLLPITEYEAVFYTDGSAIKSPKTEQTHSAGMGIVMVVYTPEPNITQQWSIPLGDHTAQYAEISAVEFACKKASLLQGPVLIVTDSDYVARSANKELPFWRSNGFLNNKKKPLKHISKWKNISDSLLLKRNITIVHEPGHQPSKTSIHTLGNSLADKLAVQGSYSVNTINKIPSLDAELNQILEGNLPKGYPKQYKYVLKNNELIVQRPEGDKIIPPKADRLPLVKTAHELAHTGREATLLKLQTTHWWPNMRKDIITVLRQCKPCLQTDSTNLTPIPPVSQP

SEQ ID NO: 471 - protein, 767 aa, Squirrel monkey simian foamy virus
TEKLPIQDYKDNIVKRADITKEEKGMLYKLLDKYDPLWQQWENQVGNRQITPHIIATGTINPKPQKQYHINPKAKPSIQIVINDLLKQGVLKQQNSIMNTPIYPVPKTEGKWRMVLDYRAVNKTIPLIAAQNQHSAGILTNLVRQKYKSTIDLSNGFWAHPIDQDSQWITAFTWEGKQYVWTRLPQGFLNSPALFTADVVDLLKEIPNVNVYVDDIYVSTETINQHFQVLDKIFQKLLQAGYVVSLKKSNLCRYEVTFLGFTISKYGRGLTEEFQEKLRNISPPNSLKQLQSILGLLNFARNFIPNFSELIKPLYELISTAQGQSISWEPKHSQALNNLIIALNHADNLEQRNGEVPLVIKINASNTTGYIRFYNKNGKRPIAYASHVFNHTEQKFTPVEKLLTTMHKAIIKGIDLAIGQPIEIYSPIVSMQKLQKITLPERKALSTRWLSWLSYIEDPRFLFIYDKTLPDLKEMPPTQTDDYNPMLPLHQYLAVFYTDGSSIKSPDPTKTHSSGMGIVQAIYEPNFQIKHQWSIPLGDHTAQYAEIAAVEFACKKALQVTGPVLIVTDSDYVARSVNNELNFWRSNGFVNNKKKPLKHISKWKSISESLLLHKNITIVHEPGHQPSSTSVHTQGNALADKLAVQGSYTINNITIKPSLDTELRAVLEGKLPKGYPKNLKYEYNSPNLIVIRKEGQRIIPPLSDRPKLVKQAHELAHTGREATLLRLQNQYWWPKMRKDVSHCLRTCMPCLQTNSTNLTTTRPFQQI

SEQ ID NO: 472 - protein, 772 aa, Equine foamy virus
TIKIDIQKQQEQLLHTTNLSSEGKKYLKDLFIKYDNLWQKWENQVGHRRITPHKIATGTLNPKPQKQYRINPKAKADIQIVIDDLLKQGVLKQQTSPMNTPVYPVPKPDGRWRMVLDYRAVNKVTPAIATQNCHSASLLNTLYRGQYKTTLDLANGFWAHPIQESDQWITSFTWNGKSYVWTTLPQGFLNSPALFTADVVDLLKDIPNVEVYVDDVYFSNDTEEEHLKTMDLLFQKLQTAGYIVSLKKSKLGQHTVDFLGFQITQTGRGLTDSYKSKLLDITPPNTLKQLQSILGLLNFARNFIPNYSELITPLYQLIPLAKGIYIPWETKHTAILQKIIKELNASENLEQRKPDVELIVKVHVSPTAGYIKFANKGSIKPIAYHNVVFSKTELKFTITEKVMTTIHKALLKAFDLAMGQPIWVYSPIHSMTRIQKTPLTERKALSIRWLKWQTYFEDPRLIFHYDDTLPDLQNLPQTTLGNEVDILPLSEYEVVFYTDGSSIKSPKKDKQHSAGMGIIAVRYQPQMNIIQEWSIPLGDHTAQFAEIAAFEFALKQAIRKMGPVLIVTDSDYVAKSYNQELDFWVSNGFVNNKKKPLKHVSKWKSIADCKKHKADIHVIHEPGHQNDLQSPYAMGNNAADKLAVKASYTVFSVQTLPSLDAELHQLLDKQTPNPKGYPSKYEYTLRDGQVYVKRTDGEKIIPSKDDRVKILELAHKGPGSGHLGKNTMYIKILNKYWWPNLIKDISKYIRTCTNCIITNTDNVPNKSYIVQE

SEQ ID NO: 473 - protein, 776 aa, Bovine foamy virus
TIKIDVESQKHTLITESTLSPQGQMRLKKLLDQYQALWQCWENQVGHRRIEPHKIATGALKPRPQKQYHINPRAKADIQIVIDDLLRQGVLRQQNSEMNTPVYPVPKADGRWRMVLDYREVNKVTPLVATQNCHSASILNTLYRGPYKSTLDLANGFWAHPIKPEDYWITAFTWGGKTYCWTVLPQGFLNSPALFTADVVDILKDIPNVQVYVDDVYVSSATEQEHLDILETIFNRLSTAGYIVSLKKSKLAKETVEFLGFSISQNGRGLTDSYKQKLMDLQPPTTLRQLQSILGLINFARNFLPNFAELVAPLYQLIPKAKGQCIPWTMDHTTQLKTIIQALNSTENLEERRPDVDLIMKVHISNTAGYIRFYNHGGQKPIAYNNALFTSTELKFTPTEKIMATIHKGLLKALDLSLGKEIHVYSAIASMTKLQKTPLSERKALSIRWLKWQTYFEDPRIKFHHDATLPDLQNLPVPQQDTGKEMTILPLLHYEAIFYTDGSAIRSPKPNKTHSAGMGIIQAKFEPDFRIVHLWSFPLGDHTAQYAEIAAFEFAIRRATGIRGPVLIVTDSNYVAKSYNEELPYWESNGFVNNKKKTLKHISKWKAIAECKNLKADIHVIHEPGHQPAEASPHAQGNALADKQAVSGSYKVFSNELKPSLDAELEQVLSTGRPNPQGYPNKYEYKLVNGLCYVDRRGEEGLKIIPPKADRVKLCQLAHDGPGSAHLGRSALLLKLQQKYWWPRMHIDASRIVLNCTVCAQTNSTNQKPRPPLVIP

SEQ ID NO: 474 - protein, 771 aa, Feline foamy virus
TIKLNLEEQQRTLLNNSILSKKGKEELKRLFEKYNALWQSWENQVGHRKIRPHKIATGTVKPTPQKQYHINPKAKPDIQIVINDLLKQGVLIQKESTMNTPVYPVPKPNGHWRMVLNYRAVNKVTPLIAVQNQHSYGILGSLFKGKYKTTIDLSNGFWAHPIVPEDYWITAFTWQGKQYCWTVLPQGFLNSPGLFTGDVVDLLQGIPNVEVYVDDVYISHDSEKEHLEYLEILFNRLNEAGYIVSLKKSNIANSSVDFLGFQITNEGQGLTDTFKEKLENITAPTTLKQLQSILGLLNFARNFIPDFTELIAPLYALIPKSTKNYVPWQIEHSTTLETLIAKLNEAKYLQGRRGDKTLIMKVNASYTTGYIRYYNEGEKKPISYVSIVFSKTELKFTKLEKLLTTVHKGLLKALDLSMGQNIHVYSPIVSMQNIQKTPQTAKKALASRWLSWLSYLEDPRIRFFYDPQMPALKDLPAVNIGENNKKHPSNFQHIFYTDGSAITSPTKEGHLNAGMGIVYFINRDGNLQKQQEWSISLGNHTAQFAKIAAFEFALKKCLPLGGNILVVTDSNYVAKAYNEELDVWASNGFVNNRKKPLKHISKWKSVANFKKLRPNVVVTHEPGHQKLNSSPHAYGNNLADQLATQASFKVQHDKNSKLDTEQIKAIQARQNNERVPVGYPKQYTYELRNNKCMVLRKDGWREIPPSRERYKLIKEAHDISHASREAVLLKIQENYWWPKMKKDVSSFLSTCNVCKMVNPLNLKPISPQAIV

SEQ ID NO: 475 - protein, 463 aa, Callorhinchus milii
DIEKLIQNQIDKTNINKDKLRELLLNKREILAKSLTDCGKVKSNAEIRGKLHHKQRQYKIRREDKETIGKIINNLMEQGVIKKCRSPTNSPIFLKKKPDGSWRLLLDCKALNECTNPKQGQSISSHGSIEKLTREKYHTTLNIANGFWSIPIVEKDQFKTAFTYQGQQYQWTRLPEGWCNSTVIFNEAIRRVLDDNPKITRFGGVIHFSNDNAESHIKLLKQILEKLDNHGLKIDLRKSQIGRYAVDFLGHQISETEDRLSRKFKEEVSQVKPPKTRKELQSVLGKFNFAREFVINYAGKAASLFKLTNKEPFQWDTNAQECLNQLQQDIQKAVPHSTRKPKSSLILDIYVSKDSSVTAVKQKSVTGEETLKYLSFNFSKAEKKFAKDERLLATLFCTLKQTCQMVTSKEKITVRTSYPELAGVTRESQRNHKALKCRWKKWESLLYDQRISFELRNGIEENE

SEQ ID NO: 476 - protein, 714 aa, Poecilia latipinna
VDVPAVTKQKIEESDFSPAGKKKLREIIASAKVARFKNDCGDLGPRFVHHIEGGVHPPVRQYPLNPGAVEEMDKIVKELGSLGIIREELNPITNSPIQAVKKPESAGGGWRPVINFKALNRRTIANRASLINPQGTLKTLRVKKFKSCIDLANGFFSLRLARQSQGKTAFTHKGKSYVWQRLPQGYKNSPNVFQSAVMEVLGDVGATVYIDDVFIADDTEEEHLERLRKVIENLTKAGLKLNLKKCQFGQFQVNYLGFQVTSDLGLSDGYREKMMNIQPPQSENELQKILGLCNYVRDHVPNYQKYAKPLYNCLKKSVENEGGGKRPWVWTAANQRDLEDLKKAIQAAVRLEPRSLSDRLVAEINCEEDDAMIKVSNENGGLVTLWSYTLTSVEKKYPQEEKELAVLARYWSVLKDLAQGQPVKVITQSQVHKYLRKGTVESTKATNARWGRWEDILLDPELEIGPAQPTNKKRQQETPEKPGQPEWTLYTDGSKKESDQVAYWGFILKQDGKERCRQKGKAPGSAQAGEVTAILEGLLELGKRKIKSARLVTDSYYCAQALKEDLAIWEENGFETAKGKPVAHRDLWKKIAELKMQLELEVEHQRAHTHEGAHWRGNDEVDCYVQQRKIVFVGIEKWDSTPRGREVPEEYVDEVVRSVHEALGHAGVRPTRKELEEHELWIPVKQVQRVLRDCEVCGKYNAGRRGQRLEGLTI

SEQ ID NO: 477 - protein, 715 aa, Larimichthys crocea
VNIPEATEQKLEESDFSPEGKEKLRKIITRATVARFKNDCGDLGSKYVHTIEGGVHPPVRQYPLNPGAVEEMDKIVTELSALDIIREEPNPITNSPIQAVKKPEAAGGGWRPVINFKALNRRTVANRASLINPQGALKTLQVKRFKSCIDLANGFFSLRLAKQSQGKTAFTHKGKAYVWQRLPQGYKNSPNVFQAAVMDVLKDLGVTIYIDDVFLADDTEEEHLQRLRQVVERLTEAGLKLNLKKCQFGQFRVNYLGFQVAADLGLSDGYREKLNQVRPPTSENDLQKILGLCNYVRDHVPNYQKYAKPLYACLKKKGEESEEETPKKWSWTATDQQNLGRLKAVIQDAIRLEPRSLTTRLVAEVSCEDDDAVVKVKNEGGGMVTLWSYTLSSVERKFPQEEKELAVLARYWGTMKDLAQGQGIKVITQSQVHRYLRKETIESTKATNTRWGRWEDILLDPDLEIGPAQPANRKAQKPQETEEKSYEWILYTDGSRKGQDDTAYWGYILKQDGKEQFRQKGRVSGSAQAGEVTAILEGLLELEKRKVKTARIITDSYYCAQALKEDLTIWEENGYEGAKGKMVAHQDLWKKIAELRLKMCLDVVHQKAHGKEGAHWKGNDEVDRYVQQRRIVFVGREKWEQTPKGRVVPESSVVEVVQAVHEALGHVGTMSTRKELEKQQLWIPVGRVRQVLKDCNVCGRYNAGRRGKRVDGLTI

SEQ ID NO: 478 - protein, 672 aa, Larimichthys crocea
VNIPEATEQKLEESDFSHEGKEKLRKIITRATVARFKNDCGDLGSKYVHTIEGGVHPPAVKKPEAAGGGWRPVINFKALNRRTVANRASLINPQGALKTLQVKRFKSCIDLANGFFSLRLAKQSQGKTAFTHKGKAYVWQRLPQGYKNSPNVFQAAVMDILKDLGVTIYIDDVFLADDTEEEHLQRLRQVVERLTEAGLKLNLKKCQFGQFRVNYLGFQVAADLGLSDGYREKLNQVRPPASENDLQKILGLCNYVRDHVPNYQKYAKPLYACLKKKGEESEEGTPKKWSWTATDQQNLGRLKAVIQDAIRLEPRSLGVAEVSCEDDDAVVKVKNEGGGMVTLWSYTLSSVEKKFPQEEKELAVLARYWGTMKDLAQGQGIKVITQSQVHRYLRKETIESTKATNTRWGRWEDILLDPDLEIGPAQPANRKAQKPQETEEKSYEWILYTDGSRKGQDDTAYWGYILKQNGKEQFRQKGLVSGSAQAGEVTAILEGLLELEKRKVKTARIITDSYYCAQALKEDLTIWEENGYEGAKGKMVAHQDLWKKIAELRLKMCLDVVHQKAHGKEGAHWKGNDEVDRYVQQRRIVFVGREKWEQTPKGRVVPESSVVEVVQAVHEALGHVGTMPTRKELEKQQLWIPVGRVHQVLKDCDVCGRYNAGRRGRRVDGLTI

SEQ ID NO: 479 - protein, 548 aa, Scophthalmus maximus
VKKFKSCIYLANRFFSLRLAKQSQGKTAFTHKGKAYVWQRLPQGYKNSPNVFQSAVMDVLSGLGATVYIDDVFIADDTEEEHLERLQKVVERISAAGLKLNLKKCQFGQFQVNYLGFQVAMDLGLSDGYREKINQITPPTTLNELQKILGLCNYVRDHVPGYQQYAKPLYACLKTKEVLRNGKPDRNWNWTATDQDNLRKLKDAIQQAVRLEPRSLTTKLVAEVSCEEEDAVLRVSNEGGGLVTLWSYTLSSVEKKYPPEEKELAVLAKYWGALKDLAQGQTIKVTTRSQVHRFLRKGTVESTKATNTRWGRWEDILLDPDLEISPEKLPSKKTTKEETTDKKPYEWTLYTDGSKKGQDDNAYWGFILKLNEKESFRQRGRALGSAQAGEVTAIMEGLLELGKRKIKRVRIITDSFYCAQALQEDLTIWEENGFESAKGKMVAHQDTHWRGNNEVDRYVQQRKVVIVGIEKWDKTPKGRVVPEEFVKEVVQAVHEALGHAGTIPTRKELEKQDLWIPEKQIRRILKDCETCGKFNAGRRGQRVDGQTI

SEQ ID NO: 480 - protein, 374 aa, Scyliorhinus torazame
MKEVLIGANLAIGKNDTGLISKRFQHTIHGGQHRPQKQYPLTRGAKSELEIAIKELEQQGIIQKVTYALTNSSLQVVSKPDGTFRMITNYKALNKVTKKDKRYLINPQTTLEQVAGKIYLTSIDLANGFWSVPLDPDSREKTAFTFGTKHYVYCRLPQGYVNSPNHFQAIVRELMKDDLALVYIDDVLIGDDDQDKHVERVARIIKTLSEAGFKIGLKKCQIGRSEVNYLGYSVSKEGREACIEMRKKVAEITAPVSRKGVKKIMGILGYLRPVVKDFSLYAKPIYETLKGDFIWSSEAQGGLDQLKTAVAISGPLVGRQEEDDLSIKLDIYKNGYGMVLVNHSNQTLIKHLTGIWPRAEQKCSDIEKCLAAII

SEQ ID NO: 481 - protein, 691 aa, Pimephales promelas
VDLEHEINRLVKETLLPKNELRKLLEKYRNSFAKSKNDCGKLDDKYEYTILGGIPAPQRQYPLNKAAYPEIRGTLNELLRKGIISVGENCPTNAPIQAVIKIDGSYRLVCNFKALNRLTVPDTRYLINARDATNCLDDGKILSKIDLANGFWSVPLAKDSRARTAFTFEGKQYVFNRLPMGFCNAPNAFQAIILEILEGLPVTAYIDDVLIATQTTEEHMRVLSETIRKLADAGFLLNLKKLELGKENVNFLGFEISGAERGIAKSTQEKLEELKKERITNLRQLQSLLGRLNFVRDLIPGYSAKAKILYKATAGKDFHWDDRLESIKCDIINMALASGRIVRRNPDKNLRVKIDNTPEEMELILYNEGDTKSPVMFISHEKPANHKKHENMSPVDILATIARNLLVIKALAAEKLIIIVAKGEGIDLLAREAKNLVNENKRVHVFTWSKWIKIIDDNQFEFRNEKSPKKDRRTVIDPEQICYFTDGSSEKGETWWGFMVKLKGKIIHKEKGRLDNDKSAQEAEVTAVAKAIMHMRDNNRKKCVLVTDSEYVYLGIVQNLSTWEQNNFNNAKGKPLAQVELWKVISECAKVVQPRVLHQSSHTVQKTPAAVGNREVDQYVRVRAITKESEGNLLQELHDKLNHPSTTYVAKYCKQLGLHVQNLKTSYQKIKIKCPDCRKVMSSVHHDFGHI

SEQ ID NO: 482 - protein, 525 aa, Medicago truncatula
FPVYKAEEEENEEIPDEISRLLEQERKTIQPYGDELEVINLGTKEDKKEIKVGASLETSVKKQVIELLKEYVDVFAWSYRDMPGLDTDIVVHHLPLKPECPPVKQKLRRTRPDMALKIKEEVQKQIDAGFLVTSNYPQWLANIVPVPKKDGKVRMCVDYRDLNKASPKDDFPLPHIDVLVDSTAKSKVFSFMDGFFGYNQIKMAPEDREKTSFITPWGTFCYKVMPFGLINAGATYQRGMTTLFHDMIHKEIEVYVDDMIVKSITEEDHVKYLQKMFQRLRKYKLRLNPNKCTFGVRSGKLLGFIVSQKGIEVDPDKVKAIREMPAPRTEKEVRGFLGRLNYISRFISHMTATCGPIFKLLRKEQGIVWTEDCQKAFDNIKKYLLEPPILIPPIEGRPLIMYLTVLENSMGCVLGQQDETGRKEHAIYYLSKKFTECESRYSILEKTCCALAWAAKRLRHYMINHTTWLVSKMDPIKYIFEKPALTGRIARWQMLLSEYDIEYRSQKAIKGSILADHLAHQPLED

SEQ ID NO: 483 - protein, 454 aa, Oryza sativa
FSSVENRREEQILFDVVNIPYNYNAIFGRATLNKFKAISHHNYLKLKMPGPKGVIVVKGLQPSAASKRDLAIINRAVHNVETEPHERPKHTPKPTPHGKVAKVQIDDFDPTKLVSLRSPRLKLRKMSADRQEAAKAEIHMNPLNIPKTSFVTPFGTFCQLRMPFGLRNAGATFARLVYKVLGKQLGRNVKAYVDDIVVKIHKAFDHANNLQETFDSLRAAGIKLNPEKCVFSVRAGKLLGFLVSERGIEANPEKIDAIQQMKPPSSVHEVQKLAGRIAALSRFLSKAAERGLPFFKTLRGAGKFNWTPECQAAFDKLKQYLQSPPVLISPPLGSELLLYLAASPVAVSAALVQETESGQKPVYFVSEALQGAKTRYIEMEKLAYALVMASRKLKHYFQAHKVIVPSQYPLGEILRGKEVTGRLSKWAAELSPFDLHFVARSAIKSQVLADTTEY

SEQ ID NO: 484 - protein, 405 aa, Danio rerio
VNPLSAPVLREEIAALLAKGAIEPVPPAEMESGFYSPYFIVPKKSGGSRPILDLRVLNRCLHKLPFRMLTQRRILQCVRPRDWFAAIDLKDAYFHVSILPRHRQFLRFAFEGRAWQYKVLPFGLSLSPRVFTKLAEGALAPLRLAGIRILSYLDDWLILAHSREQLIVHRDEVLRHLRLLGLQVNREKSKLAPVQRISFLGMELDSITMRLLGHMASAAAVTPLGLLHMRPLQHWLHDRVPRRAWHAGTHRVSVTALCRRALSPWNDPSFLQAGVPLGQASSHVVVSTDASNTGWGAVCRGHAAAGLWKGAQLHWHINRLELLAVFLALHRFLPVLERQHVLVRTDSTAAAAYINRMGGMRSRRMSQLARRLLLWSHPRLKSLRAIHVPGTLNRAADALSRQLLR

SEQ ID NO: 485 - protein, 236 aa, unidentified
  REGION 1..236: note = Description of Unknown: Candidatus Saccharimonas aalborgensis sequence
NTEELEKLLADYPAEARVFCALEPKRDGTSRPIIKPNKPLNQWLKRMKRALYRQRRDWPTFIHGGVKKRSYVSFARPHANKNTVITIDIKDCFGSITQSEVQQALVSKLGLPDGLASRLAAKLCYKRRIPQGFATSSYLTNLYLNDTLLKINRQLKRKQIDMTVYVDDIALSGQKVDSAVIINLVTLELSRARLAISKAKVKVMRSHSPQIICGLVVNKGVALSRQKRKEIFSDIA

SEQ ID NO: 486 - protein, 252 aa, Acinetobacter baumannii
FHITSKKRLAILLHSSVKELNNIVRSKDQMYQYFNETQTDNSGNIIKVRPIQNPHDRLKQIHSRIGKFLGNLKAPEYLHSKRSKSAISNAKAHVGIKGHTLNIDITDFYPSTSRAKVQAFFGYTLQYPTDIAKYLSEICTVKNCLPTGSPLSSALAFWANKSMFDEIYRVAKSRAITMTVYVDDISFTGRAVNQNFLKKIIQIVGKYQHKIKQEKIKFFPEYSVKFVTGVAILNGRLQPAHRHYRDIRVLQK

SEQ ID NO: 487 - protein, 292 aa, Parabacteroides distasonis
ARKENYYKAFDHASKNKHGKKAIIKFEADLEKNLSDLLYSFENGTFVTSPYRFMTVHEPKKRLIGMLPFPDHVQHWAMLNEVEDYFTRSFSAYTYGGVKGRGPHAYMRMIRKVLRKYPERTTDYLLCDIHHFYPTVNHPVLKSQLRTRIKDNHLLRRLDEIIDSVEGDTGMFPGTKLAQFFSLVYLYLFDHDLKRCFHVGECPALVEYYTKRYIEESIATAKTEHDYEELSKGIQYLSDRFKGYLNRLDFCYRLADDVLILHEDTVFLHLVIEWIGLYYANELRIGLNPRWK

SEQ ID NO: 488 - protein, 294 aa, Aliicoccus persicus
FSDSLPPIFSSEELSLKESNINVSKDYLSKNGSNKRSKLINFSIPKNSSFRRTLSIVHPLHYIKFANLIDEQWENISKHFEKSSVSLTKIIKNNSKLEREHGFEAMRYKQIENLSLNRFILKIDINRYYPSIYTHSIPWALHGKKYSKLNISEENLGNNLDTLTRNMQDGQTIGIPIGPFSSDIIQEIIGTAIDEDFSKKMEYKVPGYRYTDDMEYYFKNLNEANNALSVMNNVLKNYELDLNSEKTVIEKIPMVLEKEWIRSLKNFRFNKNYSKKNVRKEKELLIEYFNSIFN

SEQ ID NO: 489 - protein, 434 aa, Mustela putorius
VPPALWGSRHNQRRFLRNVKKFISLGKHAKLSPQELTWKMKVQDCAWLRGSPGACSVPAAEHRRREGVLARLLCWLMGTYVVELLRSFFYVTETTFQKNRLFFYRKSVWSPLQTLGVRQHCTSVRLRELSAAEVRRQHEARATLLTSRLRFLPKPGGLRPIVNMDYVAGARALCRDKKIQHLTSQVKTLFSVLNYERARRPRLLGASVLGMDDIHRAWHDFVLRVRAQDPAPRLYFVKVDVTGAYDALPQDRLAEVVANVLRPHENTYCLRRYAVVRRTAQGHVRRSFKRHVSTFTDLPPYMRQFVERLQETTSLRDSVVIEQSYSLNEASSGLFQLFLSLVYSHVIRIGGNLLLRLVDDFLLITPHLKRAQAFLRTLVRGVPEYGCSANLQKTAVNFPVEDMALGSTAPLQLPAHCLFPWCGLLLDTQTLEVS

SEQ ID NO: 490 - protein, 414 aa, Cauliflower mosaic virus
LDLKVIKPSKSPHMAPAFLVNNEAEKRRGKKRMVVNYKAMNKATVGDAYNLPNKDELLTLIRGKKIFSSFDCKSGFWQVLLDQESRPLTAFTCPQGHYEWNVVPFGLKQAPSIFQRHMDEAFRVFRKFCCVYVDDILVFSNNEEDHLLHVAMILQKCNQHGIILSKKKAQLFKKKINFLGLEIDEGTHKPQGHILEHINKFPDTLEDKKQLQRFLGILTYASDYIPKLAQIRKPLQAKLKENVPWRWTKEDTLYMQKVKKNLQGFPPLHHPLPEEKLIIETDASDDYWGGMLKAIKINEGTNTELICRYASGSFKAAEKNYHSNDKETLAVINTIKKFSIYLTPVHFLIRTDNTHFKSFVNLNYKGDSKLGRNIRWQAWLSHYSFDVEHIKGTDNHFADFLSREFNKVNSSGGS

SEQ ID NO: 491 - protein, 413 aa, Coccidioides immitis
QHYHDTIQQENQLIPSFFTYIAKLKQDLDSLPDEFFHKRRSKVKDYPQTKKTPVKPLPKISEEEHKQQIDEELCLRCGQPGHKTKFCTNSSNKSQQTDKKNKNQAKTRTAKPMQDPGQTLERQGVNPIKKASRCKQAALLDSGTTVNSISYKLASQLDWDQPETPMEVIEMLNRAEADWYSIYKTQLTITDSMGTIKMKKYYCPSRQRFYKNDILIFSASEKEHEKHVRLVMEYLREYQLFAKLAKCAFKRQTISYLGYIIDNEGIKMDPKQIQVITEWLLLQSFHNIQIFLGFANFYQRFIQKYSVIVALLTDLLKSSEKRRKKEPFLLTPTTRKVFCELQAVFFREPVIQHYNPECRIHLETDTSEHAAEMVQGRPGGTKIIDVLNLLLEAQGDDSSVQARFTKTESQQSE

SEQ ID NO: 492 - protein, 906 aa, Parastagonospora nodorum
AASSLSTLQHVTLQKLNKLDSQRQQFESDKKSILEQVSSVPDHRSKVEALLDGFELHGIAPKQADLSISNLKHFVHQAKHDPSVSASLLKDWQSRLEHELNVKSNKYEYAALFGKLVTEWIKHSTLVKSADVSDGSIAKGRKKMQEQRQSWENYAFVEKEVNQSTIEQYLSDIFGDALQTEKIKKSPLRVLRDSMKEVMDFKSDLDTSEKDFSSNKRFGHSAPHGSRFTIELLQSCIRGVKKADLFTGRKLEMIIDLEKQPAVLKELVDVLNMDVDGLDHWEWDGPVPLNMRRQTNEIHQAILLHFIGKTWAVALKKAFTNFYHSGAWLQAPYRSMPKKIRQRREHFIENSNKSGDSVRNYRRQKYQQEYFMTQLPSNAFEDAREYDAAEGQEKNSHIATKQTMLRLLTTEILLNTKVYGECSVLQSDFKWFGPSLPHDTIFAVLEFFGVPAKWLRFFKRFLEVPVVFAQDGAGAKARVRKCGIPNSHILSDALGEAVLFCLDFAVNRRTKGANIHRFHDDLWFWGQETTSVQAWEAIKEFTEVMGLQLNEEKTGSSIIVADKSRARVPHPNLPEGNLHWGFLELDASAGRWVIDRAQVDEHITELRRQLDACHSVMAWIQAWNSYVGLFFNTNFAQPANCFGRQHNDMIIETFSHIQRSFFGKYGTANVTEYLRSVLKERFQTTDAVPDAFFYFPVELGGLGLNNPSISAFATYQNSSRDPSARIERAFEEEREAYDTAKQRWDAGDVPCPNRETDEPFMSFEEYTAFREETSHPLFEAYMNLLECPVEERVETSDEMYEALRRSDAPHALGSNHYWLWIFNLYAGDLKQRFGGQGVQLGERDLLPVGLVEVLKSEKIYPGSNPFGINQLFTLFRLRKKLRMSVANGWGGYDVTKEPRRTNKDEL

SEQ ID NO: 493 - protein, 862 aa, Astyanax mexicanus
PSTQTEFEKQLQQMLLDADALQSDEERVKLRTVLTKYRASFSQDSMDCGLTHIHMIRIPTHPDAAPAYVRQYKIPLASYGPVQEIIDDLLDKGIIRPCNSTYSAPLWPVLKPNGKWRLTIDYRRLNDQVPLSRWPMTQLEQELPRVRDAKYFSTLDVASGFWTIPVHVEDQHKLAFTFAGRQFTFTRCPFGYSNSPAEFNIFLNKACPDARERGTLIYVDDVLIRNNSLDAHLEEIDHVLDQLTKAGAKISLAKCQWCKTKVNYVGLLVGPDGVLPQPCRAQGIVDIAEPKTIHALRSFLGVCNYSRQFIENFAELAKPLYQLLKQDVPFIWGEAQAQAMQTLKDKLASAPCLTYPDHSREFYLQVGFSEHCVSAGLYQVHDRDKRVVAYASKALMAPELKYSDCEKALLATVWAVKHFSNYLGGQKIIVETNHQPVVFLNSQRIREGVVTNARVASWLMALQSFEVEVRYAQNSRLPLGTDLAACQRCETDIPATSVPIPNLASQKPTNHRYFDPKECENIPTVYVDGCSFRHDQEGLKAGAGIVWLDDNPCEPQQFKLGSQTSQYAEIAAILITIQLAIDQGVKTLVICTDSNYARLSFTCHLPIWKTKGFLTSGRKAVKHTELFTAADYLVVRHDMLVYWKKVRGHSRVPGTDKTYNDQADSLAKRGALEGVSWVFDPLKYPTQPNPTVLAVTRAQAKQTSTTEIPPCAAVSIDPEITDADLITLQDADPDIKSIKAFLLDPTNNPITSQMLEASIPLKQLLDNRAFLKVVKGLLVHVTETHTSPAFVVPPCHRGVMLGHAHDSPSAGHKGIKETYRTLKQVAFWPRMREHVASYIKGCLVCCQFQPANPLHRAPLQRK

SEQ ID NO: 494 - protein, 1368 aa, synthetic construct
  REGION 1..1368: note = Description of Artificial Sequence: Synthetic polypeptide
MDKKYSIGLDIGTNSVGWAVITDEYKVPSKKFKVLGNTDRHSIKKNLIGALLFDSGETAEATRLKRTARRRYTRRKNRICYLQEIFSNEMAKVDDSFFHRLEESFLVEEDKKHERHPIFGNIVDEVAYHEKYPTIYHLRKKLVDSTDKADLRLIYLALAHMIKFRGHFLIEGDLNPDNSDVDKLFIQLVQTYNQLFEENPINASGVDAKAILSARLSKSRRLENLIAQLPGEKKNGLFGNLIALSLGLTPNFKSNFDLAEDAKLQLSKDTYDDDLDNLLAQIGDQYADLFLAAKNLSDAILLSDILRVNTEITKAPLSASMIKRYDEHHQDLTLLKALVRQQLPEKYKEIFFDQSKNGYAGYIDGGASQEEFYKFIKPILEKMDGTEELLVKLNREDLLRKQRTFDNGSIPHQIHLGELHAILRRQEDFYPFLKDNREKIEKILTFRIPYYVGPLARGNSRFAWMTRKSEETITPWNFEEVVDKGASAQSFIERMTNFDKNLPNEKVLPKHSLLYEYFTVYNELTKVKYVTEGMRKPAFLSGEQKKAIVDLLFKTNRKVTVKQLKEDYFKKIECFDSVEISGVEDRFNASLGTYHDLLKIIKDKDFLDNEENEDILEDIVLTLTLFEDREMIEERLKTYAHLFDDKVMKQLKRRRYTGWGRLSRKLINGIRDKQSGKTILDFLKSDGFANRNFMQLIHDDSLTFKEDIQKAQVSGQGDSLHEHIANLAGSPAIKKGILQTVKVVDELVKVMGRHKPENIVIEMARENQTTQKGQKNSRERMKRIEEGIKELGSQILKEHPVENTQLQNEKLYLYYLQNGRDMYVDQELDINRLSDYDVDHIVPQSFLKDDSIDNKVLTRSDKNRGKSDNVPSEEVVKKMKNYWRQLLNAKLITQRKFDNLTKAERGGLSELDKAGFIKRQLVETRQITKHVAQILDSRMNTKYDENDKLIREVKVITLKSKLVSDFRKDFQFYKVREINNYHHAHDAYLNAVVGTALIKKYPKLESEFVYGDYKVYDVRKMIAKSEQEIGKATAKYFFYSNIMNFFKTEITLANGEIRKRPLIETNGETGEIVWDKGRDFATVRKVLSMPQVNIVKKTEVQTGGFSKESILPKRNSDKLIARKKDWDPKKYGGFLWPTVAYSVLVVAKVEKGKSKKLKSVKELLGITIMERSSFEKNPIDFLEAKGYKEVKKDLIIKLPKYSLFELENGRKRMLASAKQLQKGNELALPSKYVNFLYLASHYEKLKGSPEDNEQKQLFVEQHKHYLDEIIEQISEFSKRVILADANLDKVLSAYNKHRDKPIREQAENIIHLFTLTNLGAPAAFKYFDTTIDRKQYRSTKEVLDATLIHQSITGLYETRIDLSQLGGD

SEQ ID NO: 495 - protein, 1368 aa, synthetic construct
  REGION 1..1368: note = Description of Artificial Sequence: Synthetic polypeptide
MDKKYSIGLDIGTNSVGWAVITDEYKVPSKKFKVLGNTDRHSIKKNLIGALLFDSGETAEATRLKRTARRRYTRRKNRICYLQEIFSNEMAKVDDSFFHRLEESFLVEEDKKHERHPIFGNIVDEVAYHEKYPTIYHLRKKLVDSTDKADLRLIYLALAHMIKFRGHFLIEGDLNPDNSDVDKLFIQLVQTYNQLFEENPINASGVDAKAILSARLSKSRRLENLIAQLPGEKKNGLFGNLIALSLGLTPNFKSNFDLAEDAKLQLSKDTYDDDLDNLLAQIGDQYADLFLAAKNLSDAILLSDILRVNTEITKAPLSASMIKRYDEHHQDLTLLKALVRQQLPEKYKEIFFDQSKNGYAGYIDGGASQEEFYKFIKPILEKMDGTEELLVKLNREDLLRKQRTFDNGSIPHQIHLGELHAILRRQEDFYPFLKDNREKIEKILTFRIPYYVGPLARGNSRFAWMTRKSEETITPWNFEEVVDKGASAQSFIERMTNFDKNLPNEKVLPKHSLLYEYFTVYNELTKVKYVTEGMRKPAFLSGEQKKAIVDLLFKTNRKVTVKQLKEDYFKKIECFDSVEISGVEDRFNASLGTYHDLLKIIKDKDFLDNEENEDILEDIVLTLTLFEDREMIEERLKTYAHLFDDKVMKQLKRRRYTGWGRLSRKLINGIRDKQSGKTILDFLKSDGFANRNFMQLIHDDSLTFKEDIQKAQVSGQGDSLHEHIANLAGSPAIKKGILQTVKVVDELVKVMGRHKPENIVIEMARENQTTQKGQKNSRERMKRIEEGIKELGSQILKEHPVENTQLQNEKLYLYYLQNGRDMYVDQELDINRLSDYDVDAIVPQSFLKDDSIDNKVLTRSDKNRGKSDNVPSEEVVKKMKNYWRQLLNAKLITQRKFDNLTKAERGGLSELDKAGFIKRQLVETRQITKHVAQILDSRMNTKYDENDKLIREVKVITLKSKLVSDFRKDFQFYKVREINNYHHAHDAYLNAVVGTALIKKYPKLESEFVYGDYKVYDVRKMIAKSEQEIGKATAKYFFYSNIMNFFKTEITLANGEIRKRPLIETNGETGEIVWDKGRDFATVRKVLSMPQVNIVKKTEVQTGGFSKESILPKRNSDKLIARKKDWDPKKYGGFDSPTVAYSVLVVAKVEKGKSKKLKSVKELLGITIMERSSFEKNPIDFLEAKGYKEVKKDLIIKLPKYSLFELENGRKRMLASAGELQKGNELALPSKYVNFLYLASHYEKLKGSPEDNEQKQLFVEQHKHYLDEIIEQISEFSKRVILADANLDKVLSAYNKHRDKPIREQAENIIHLFTLTNLGAPAAFKYFDTTIDRKRYTSTKEVLDATLIHQSITGLYETRIDLSQLGGD

SEQ ID NO: 496 - protein, 1054 aa, synthetic construct
  REGION 1..1054: note = Description of Artificial Sequence: Synthetic polypeptide
MNQKFILGLDIGITSVGYGLIDYETKNIIDAGVRLFPEANVENNEGRRSKRGSRRLKRRRIHRLERVKKLLEDYNLLDQSQIPQSTNPYAIRVKGLSEALSKDELVIALLHIAKRRGIHKIDVIDSNDDVGNELSTKEQLNKNSKLLKDKFVCQIQLERMNEGQVRGEKNRFKTADIIKEIIQLLNVQKNFHQLDENFINKYIELVEMRREYFEGPGKGSPYGWEGDPKAWYETLMGHCTYFPDELRSVKYAYSADLFNALNDLNNLVIQRDGLSKLEYHEKYHIIENVFKQKKKPTLKQIANEINVNPEDIKGYRITKSGKPQFTEFKLYHDLKSVLFDQSILENEDVLDQIAEILTIYQDKDSIKSKLTELDILLNEEDKENIAQLTGYTGTHRLSLKCIRLVLEEQWYSSRNQMEIFTHLNIKPKKINLTAANKIPKAMIDEFILSPVVKRTFGQAINLINKIIEKYGVPEDIIIELARENNSKDKQKFINEMQKKNENTRKRINEIIGKYGNQNAKRLVEKIRLHDEQEGKCLYSLESIPLEDLLNNPNHYEVDHIIPRSVSFDNSYHNKVLVKQSEASKKSNLTPYQYFNSGKSKLSYNQFKQHILNLSKSQDRISKKKKEYLLEERDINKFEVQKEFINRNLVDTRYATRELTNYLKAYFSANNMNVKVKTINGSFTDYLRKVWKFKKERNHGYKHHAEDALIIANADFLFKENKKLKAVNSVLEKPEIESKQLDIQVDSEDNYSEMFIIPKQVQDIKDFRNFKYSHRVDKKPNRQLINDTLYSTRKKDNSTYIVQTIKDIYAKDNTTLKKQFDKSPEKFLMYQHDPRTFEKLEVIMKQYANEKNPLAKYHEETGEYLTKYSKKNNGPIVKSLKYIGNKLGSHLDVTHQFKSSTKKLVKLSIKPYRFDVYLTDKGYKFITISYLDVLKKDNYYYIPEQKYDKLKLGKAIDKNAKFIASFYKNDLIKLDGEIYKIIGVNSDTRNMIELDLPDIRYKEYCELNNIKGEPRIKKTIGKKVNSIEKLTTDVLGNVFTNTQYTKPQLLFKRGN

SEQ ID NO: 497 - protein, 1053 aa, synthetic construct
  REGION 1..1053: note = Description of Artificial Sequence: Synthetic polypeptide
MKRNYILGLDIGITSVGYGIIDYETRDVIDAGVRLFKEANVENNEGRRSKRGARRLKRRRRHRIQRVKKLLFDYNLLTDHSELSGINPYEARVKGLSQKLSEEEFSAALLHLAKRRGVHNVNEVEEDTGNELSTKEQISRNSKALEEKYVAELQLERLKKDGEVRGSINRFKTSDYVKEAKQLLKVQKAYHQLDQSFIDTYIDLLETRRTYYEGPGEGSPFGWKDIKEWYEMLMGHCTYFPEELRSVKYAYNADLYNALNDLNNLVITRDENEKLEYYEKFQIIENVFKQKKKPTLKQIAKEILVNEEDIKGYRVTSTGKPEFTNLKVYHDIKDITARKEIIENAELLDQIAKILTIYQSSEDIQEELTNLNSELTQEEIEQISNLKGYTGTHNLSLKAINLILDELWHTNDNQIAIFNRLKLVPKKVDLSQQKEIPTTLVDDFILSPVVKRSFIQSIKVINAIIKKYGLPNDIIIELAREKNSKDAQKMINEMQKRNRQTNERIEEIIRTTGKENAKYLIEKIKLHDMQEGKCLYSLEAIPLEDLLNNPFNYEVDHIIPRSVSFDNSFNNKVLVKQEEASKKGNRTPFQYLSSSDSKISYETFKKHILNLAKGKGRISKTKKEYLLEERDINRFSVQKDFINRNLVDTRYATRGLMNLLRSYFRVNNLDVKVKSINGGFTSFLRRKWKFKKERNKGYKHHAEDALIIANADFIFKEWKKLDKAKKVMENQMFEEKQAESMPEIETEQEYKEIFITPHQIKHIKDFKDYKYSHRVDKKPNRELINDTLYSTRKDDKGNTLIVNNLNGLYDKDNDKLKKLINKSPEKLLMYHHDPQTYQKLKLIMEQYGDEKNPLYKYYEETGNYLTKYSKKDNGPVIKKIKYYGNKLNAHLDITDDYPNSRNKVVKLSLKPYRFDVYLDNGVYKFVTVKNLDVIKKENYYEVNSKCYEEAKKLKKISNQAEFIASFYNNDLIKINGELYRVIGVNNDLLNRIEVNMIDITYREYLENMNDKRPPRIIKTIASKTQSIKKYSTDILGNLYEVKSKKHPQIIKKG

SEQ ID NO: 498 - protein, 1368 aa, synthetic construct
  REGION 1..1368: note = Description of Artificial Sequence: Synthetic polypeptide
MDKKYSIGLDIGTNSVGWAVITDEYKVPSKKFKVLGNTDRHSIKKNLIGALLFDSGETAEATRLKRTARRRYTRRKNRICYLQEIFSNEMAKVDDSFFHRLEESFLVEEDKKHERHPIFGNIVDEVAYHEKYPTIYHLRKKLVDSTDKADLRLIYLALAHMIKFRGHFLIEGDLNPDNSDVDKLFIQLVQTYNQLFEENPINASGVDAKAILSARLSKSRRLENLIAQLPGEKKNGLFGNLIALSLGLTPNFKSNFDLAEDAKLQLSKDTYDDDLDNLLAQIGDQYADLFLAAKNLSDAILLSDILRVNTEITKAPLSASMIKRYDEHHQDLTLLKALVRQQLPEKYKEIFFDQSKNGYAGYIDGGASQEEFYKFIKPILEKMDGTEELLVKLNREDLLRKQRTFDNGSIPHQIHLGELHAILRRQEDFYPFLKDNREKIEKILTFRIPYYVGPLARGNSRFAWMTRKSEETITPWNFEEVVDKGASAQSFIERMTNFDKNLPNEKVLPKHSLLYEYFTVYNELTKVKYVTEGMRKPAFLSGEQKKAIVDLLFKTNRKVTVKQLKEDYFKKIECFDSVEISGVEDRFNASLGTYHDLLKIIKDKDFLDNEENEDILEDIVLTLTLFEDREMIEERLKTYAHLFDDKVMKQLKRRRYTGWGRLSRKLINGIRDKQSGKTILDFLKSDGFANRNFMQLIHDDSLTFKEDIQKAQVSGQGDSLHEHIANLAGSPAIKKGILQTVKVVDELVKVMGRHKPENIVIEMARENQTTQKGQKNSRERMKRIEEGIKELGSQILKEHPVENTQLQNEKLYLYYLQNGRDMYVDQELDINRLSDYDVDAIVPQSFLKDDSIDNKVLTRSDKNRGKSDNVPSEEVVKKMKNYWRQLLNAKLITQRKFDNLTKAERGGLSELDKAGFIKRQLVETRQITKHVAQILDSRMNTKYDENDKLIREVKVITLKSKLVSDFRKDFQFYKVREINNYHHAHDAYLNAVVGTALIKKYPKLESEFVYGDYKVYDVRKMIAKSEQEIGKATAKYFFYSNIMNFFKTEITLANGEIRKRPLIETNGETGEIVWDKGRDFATVRKVLSMPQVNIVKKTEVQTGGFSKESIRPKRNSDKLIARKKDWDPKKYGGFVSPTVAYSVLVVAKVEKGKSKKLKSVKELLGITIMERSSFEKNPIDFLEAKGYKEVKKDLIIKLPKYSLFELENGRKRMLASARFLQKGNELALPSKYVNFLYLASHYEKLKGSPEDNEQKQLFVEQHKHYLDEIIEQISEFSKRVILADANLDKVLSAYNKHRDKPIREQAENIIHLFTLTNLGAPRAFKYFDTTIDRKVYRSTKEVLDATLIHQSITGLYETRIDLSQLGGD

SEQ ID NO: 499 - protein, 1368 aa, synthetic construct
  REGION 1..1368: note = Description of Artificial Sequence: Synthetic polypeptide
MDKKYSIGLDIGTNSVGWAVITDEYKVPSKKFKVLGNTDRHSIKKNLIGALLFDSGETAEATRLKRTARRRYTRRKNRICYLQEIFSNEMAKVDDSFFHRLEESFLVEEDKKHERHPIFGNIVDEVAYHEKYPTIYHLRKKLVDSTDKADLRLIYLALAHMIKFRGHFLIEGDLNPDNSDVDKLFIQLVQTYNQLFEENPINASGVDAKAILSARLSKSRRLENLIAQLPGEKKNGLFGNLIALSLGLTPNFKSNFDLAEDAKLQLSKDTYDDDLDNLLAQIGDQYADLFLAAKNLSDAILLSDILRVNTEITKAPLSASMIKRYDEHHQDLTLLKALVRQQLPEKYKEIFFDQSKNGYAGYIDGGASQEEFYKFIKPILEKMDGTEELLVKLNREDLLRKQRTFDNGSIPHQIHLGELHAILRRQEDFYPFLKDNREKIEKILTFRIPYYVGPLARGNSRFAWMTRKSEETITPWNFEEVVDKGASAQSFIERMTNFDKNLPNEKVLPKHSLLYEYFTVYNELTKVKYVTEGMRKPAFLSGEQKKAIVDLLFKTNRKVTVKQLKEDYFKKIECFDSVEISGVEDRFNASLGTYHDLLKIIKDKDFLDNEENEDILEDIVLTLTLFEDREMIEERLKTYAHLFDDKVMKQLKRRRYTGWGRLSRKLINGIRDKQSGKTILDFLKSDGFANRNFMQLIHDDSLTFKEDIQKAQVSGQGDSLHEHIANLAGSPAIKKGILQTVKVVDELVKVMGRHKPENIVIEMARENQTTQKGQKNSRERMKRIEEGIKELGSQILKEHPVENTQLQNEKLYLYYLQNGRDMYVDQELDINRLSDYDVDAIVPQSFLKDDSIDNKVLTRSDKNRGKSDNVPSEEVVKKMKNYWRQLLNAKLITQRKFDNLTKAERGGLSELDKAGFIKRQLVETRQITKHVAQILDSRMNTKYDENDKLIREVKVITLKSKLVSDFRKDFQFYKVREINNYHHAHDAYLNAVVGTALIKKYPKLESEFVYGDYKVYDVRKMIAKSEQEIGKATAKYFFYSNIMNFFKTEITLANGEIRKRPLIETNGETGEIVWDKGRDFATVRKVLSMPQVNIVKKTEVQTGGFSKESILPKRNSDKLIARKKDWDPKKYGGFVSPTVAYSVLVVAKVEKGKSKKLKSVKELLGITIMERSSFEKNPIDFLEAKGYKEVKKDLIIKLPKYSLFELENGRKRMLASARELQKGNELALPSKYVNFLYLASHYEKLKGSPEDNEQKQLFVEQHKHYLDEIIEQISEFSKRVILADANLDKVLSAYNKHRDKPIREQAENIIHLFTLTNLGAPAAFKYFDTTIDRKQYRSTKEVLDATLIHQSITGLYETRIDLSQLGGD

SEQ ID NO: 500 - protein, 1368 aa, synthetic construct
  REGION 1..1368: note = Description of Artificial Sequence: Synthetic polypeptide
MDKKYSIGLDIGTNSVGWAVITDEYKVPSKKFKVLGNTDRHSIKKNLIGALLFDSGETAERTRLKRTARRRYTRRKNRICYLQEIFSNEMAKVDDSFFHRLEESFLVEEDKKHERHPIFGNIVDEVAYHEKYPTIYHLRKKLVDSTDKADLRLIYLALAHMIKFRGHFLIEGDLNPDNSDVDKLFIQLVQTYNQLFEENPINASGVDAKAILSARLSKSRRLENLIAQLPGEKKNGLFGNLIALSLGLTPNFKSNFDLAEDAKLQLSKDTYDDDLDNLLAQIGDQYADLFLAAKNLSDAILLSDILRVNTEITKAPLSASMIKRYDEHHQDLTLLKALVRQQLPEKYKEIFFDQSKNGYAGYIDGGASQEEFYKFIKPILEKMDGTEELLVKLNREDLLRKQRTFDNGSIPHQIHLGELHAILRRQEDFYPFLKDNREKIEKILTFRIPYYVGPLARGNSRFAWMTRKSEETITPWNFEEVVDKGASAQSFIERMTNFDKNLPNEKVLPKHSLLYEYFTVYNELTKVKYVTEGMRKPAFLSGEQKKAIVDLLFKTNRKVTVKQLKEDYFKKIECFDSVEISGVEDRFNASLGTYHDLLKIIKDKDFLDNEENEDILEDIVLTLTLFEDREMIEERLKTYAHLFDDKVMKQLKRRRYTGWGRLSRKLINGIRDKQSGKTILDFLKSDGFANRNFMQLIHDDSLTFKEDIQKAQVSGQGDSLHEHIANLAGSPAIKKGILQTVKVVDELVKVMGRHKPENIVIEMARENQTTQKGQKNSRERMKRIEEGIKELGSQILKEHPVENTQLQNEKLYLYYLQNGRDMYVDQELDINRLSDYDVDAIVPQSFLKDDSIDNKVLTRSDKNRGKSDNVPSEEVVKKMKNYWRQLLNAKLITQRKFDNLTKAERGGLSELDKAGFIKRQLVETRQITKHVAQILDSRMNTKYDENDKLIREVKVITLKSKLVSDFRKDFQFYKVREINNYHHAHDAYLNAVVGTALIKKYPKLESEFVYGDYKVYDVRKMIAKSEQEIGKATAKYFFYSNIMNFFKTEITLANGEIRKRPLIETNGETGEIVWDKGRDFATVRKVLSMPQVNIVKKTEVQTGGFSKESIRPKRNSDKLIARKKDWDPKKYGGFLWPTVAYSVLVVAKVEKGKSKKLKSVKELLGITIMERSSFEKNPIDFLEAKGYKEVKKDLIIKLPKYSLFELENGRKRMLASAKQLQKGNELALPSKYVNFLYLASHYEKLKGSPEDNEQKQLFVEQHKHYLDEIIEQISEFSKRVILADANLDKVLSAYNKHRDKPIREQAENIIHLFTLTRLGAPRAFKYFDTTIDPKQYRSTKEVLDATLIHQSITGLYETRIDLSQLGGD

SEQ ID NO: 501 - protein, 1057 aa, synthetic construct
  REGION 1..1057: note = Description of Artificial Sequence: Synthetic polypeptide
MNQKFILGLDIGITSVGYGLIDYETKNIIDAGVRLFPEANVENNEGRRSKRGSRRLKRRRIHRLERVKLLLTEYDLINKEQIPTSNNPYQIRVKGLSEILSKDELAIALLHLAKRRGIHNVDVAADKEETASDSLSTKDQINKNAKFLESRYVCELQKERLENEGHVRGVENRFLTKDIVREAKKIIDTQMQYYPEIDETFKEKYISLVETRREYFEGPGQGSPFGWNGDLKKWYEMLMGHCTYFPQELRSVKYAYSADLFNALNDLNNLIIQRDNSEKLEYHEKYHIIENVFKQKKKPTLKQIAKEIGVNPEDIKGYRITKSGTPEFTSFKLFHDLKKVVKDHAILDDIDLLNQIAEILTIYQDKDSIVAELGQLEYLMSEADKQSISELTGYTGTHSLSLKCMNMIIDELWHSSMNQMEVFTYLNMRPKKYELKGYQRIPTDMIDDAILSPVVKRTFIQSINVINKVIEKYGIPEDIIIELARENNSDDRKKFINNLQKKNEATRKRINEIIGQTGNQNAKRIVEKIRLHDQQEGKCLYSLESIPLEDLLNNPNHYEVDHIIPRSVSFDNSYHNKVLVKQSEASKKSNLTPYQYFNSGKSKLSYNQFKQHILNLSKSQDRISKKKKEYLLEERDINKFEVQKEFINRNLVDTRYATRELTNYLKAYFSANNMNVKVKTINGSFTDYLRKVWKFKKERNHGYKHHAEDALIIANADFLFKENKKLKAVNSVLEKPEIETKQLDIQVDSEDNYSEMFIIPKQVQDIKDFRNFKYSHRVDKKPNRQLINDTLYSTRKKDNSTYIVQTIKDIYAKDNTTLKKQFDKSPEKFLMYQHDPRTFEKLEVIMKQYANEKNPLAKYHEETGEYLTKYSKKNNGPIVKSLKYIGNKLGSHLDVTHQFKSSTKKLVKLSIKNYRFDVYLTEKGYKFVTIAYLNVFKKDNYYYIPKDKYQELKEKKKIKDTDQFIASFYKNDLIKLNGDLYKIIGVNSDDRNIIELDYYDIKYKDYCEINNIKGEPRIKKTIGKKTESIEKFTTDVLGNLYLHSTEKAPQLIFKRGL

SEQ ID NO: 502 - protein, 1057 aa, synthetic construct
  REGION 1..1057: note = Description of Artificial Sequence: Synthetic polypeptide
MNQKFILGLDIGITSVGYGLIDYETKNIIDAGVRLFPEANVENNEGRRSKRGSRRLKRRRIHRLERVKLLLTEYDLINKEQIPTSNNPYQIRVKGLSEILSKDELAIALLHLAKRRGIHNVDVAADKEETASDSLSTKDQINKNAKFLESRYVCELQKERLENEGHVRGVENRFLTKDIVREAKKIIDTQMQYYPEIDETFKEKYISLVETRREYFEGPGQGSPFGWNGDLKKWYEMLMGHCTYFPQELRSVKYAYSADLFNALNDLNNLIIQRDNSEKLEYHEKYHIIENVFKQKKKPTLKQIAKEIGVNPEDIKGYRITKSGTPEFTSFKLFHDLKKVVKDHAILDDIDLLNQIAEILTIYQDKDSIVAELGQLEYLMSEADKQSISELTGYTGTHSLSLKCMNMIIDELWHSSMNQMEVFTYLNMRPKKYELKGYQRIPTDMIDDAILSPVVKRTFIQSINVINKVIEKYGIPEDIIIELARENNSDDRKKFINNLQKKNEATRKRINEIIGQTGNQNAKRIVEKIRLHDQQEGKCLYSLESIPLEDLLNNPNHYEVDHIIPRSVSFDNSYHNKVLVKQSEASKKSNLTPYQYFNSGKSKLSYNQFKQHILNLSKSQDRISKKKKEYLLEERDINKFEVQKEFINRNLVDTRYATRELTSYLKAYFSANNMDVKVKTINGSFTNHLRKVWRFDKYRNHGYKHHAEDALIIANADFLFKENKKLQNTNKILEKPTIENNTKKVTVEKEEDYNNVFETPKLVEDIKQYRDYKFSHRVDKKPNRQLINDTLYSTRMKDEHDYIVQTITDIYGKDNTNLKKQFNKNPEKFLMYQNDPKTFEKLSIIMKQYSDEKNPLAKYYEETGEYLTKYSKKNNGPIVKKIKLLGNKVGNHLDVTNKYENSTKKLVKLSIKNYRFDVYLTEKGYKFVTIAYLNVFKKDNYYYIPKDKYQELKEKKKIKDTDQFIASFYKNDLIKLNGDLYKIIGVNSDDRNIIELDYYDIKYKDYCEINNIKGEPRIKKTIGKKTESIEKFTTDVLGNLYLHSTEKAPQLIFKRGL

SEQ ID NO: 503 - protein, 1368 aa, synthetic construct
  REGION 1..1368: note = Description of Artificial Sequence: Synthetic polypeptide
MDKKYSIGLDIGTNSVGWAVITDEYKVPSKKFKVLGNTDRHSIKKNLIGALLFDSGETAEATRLKRTARRRYTRRKNRICYLQEIFSNEMAKVDDSFFHRLEESFLVEEDKKHERHPIFGNIVDEVAYHEKYPTIYHLRKKLVDSTDKADLRLIYLALAHMIKFRGHFLIEGDLNPDNSDVDKLFIQLVQTYNQLFEENPINASGVDAKAILSARLSKSRRLENLIAQLPGEKKNGLFGNLIALSLGLTPNFKSNFDLAEDAKLQLSKDTYDDDLDNLLAQIGDQYADLFLAAKNLSDAILLSDILRVNTEITKAPLSASMIKRYDEHHQDLTLLKALVRQQLPEKYKEIFFDQSKNGYAGYIDGGASQEEFYKFIKPILEKMDGTEELLVKLNREDLLRKQRTFDNGSIPHQIHLGELHAILRRQEDFYPFLKDNREKIEKILTFRIPYYVGPLARGNSRFAWMTRKSEETITPWNFEEVVDKGASAQSFIERMTNFDKNLPNEKVLPKHSLLYEYFTVYNELTKVKYVTEGMRKPAFLSGEQKKAIVDLLFKTNRKVTVKQLKEDYFKKIECFDSVEISGVEDRFNASLGTYHDLLKIIKDKDFLDNEENEDILEDIVLTLTLFEDREMIEERLKTYAHLFDDKVMKQLKRRRYTGWGRLSRKLINGIRDKQSGKTILDFLKSDGFANRNFMQLIHDDSLTFKEDIQKAQVSGQGDSLHEHIANLAGSPAIKKGILQTVKVVDELVKVMGRHKPENIVIEMARENQTTQKGQKNSRERMKRIEEGIKELGSQILKEHPVENTQLQNEKLYLYYLQNGRDMYVDQELDINRLSDYDVDAIVPQSFLKDDSIDNKVLTRSDKNRGKSDNVPSEEVVKKMKNYWRQLLNAKLITQRKFDNLTKAERGGLSELDKAGFIKRQLVETRQITKHVAQILDSRMNTKYDENDKLIREVKVITLKSKLVSDFRKDFQFYKVREINNYHHAHDAYLNAVVGTALIKKYPKLESEFVYGDYKVYDVRKMIAKSEQEIGKATAKYFFYSNIMNFFKTEITLANGEIRKRPLIETNGETGEIVWDKGRDFATVRKVLSMPQVNIVKKTEVQTGGFSKESILPKRNSDKLIARKKDWDPKKYGGFLWPTVAYSVLVVAKVEKGKSKKLKSVKELLGITIMERSSFEKNPIDFLEAKGYKEVKKDLIIKLPKYSLFELENGRKRMLASAKQLQKGNELALPSKYVNFLYLASHYEKLKGSPEDNEQKQLFVEQHKHYLDEIIEQISEFSKRVILADANLDKVLSAYNKHRDKPIREQAENIIHLFTLTNLGAPAAFKYFDTTIDRKQYRSTKEVLDATLIHQSITGLYETRIDLSQLGGD

SEQ ID NO: 504 - protein, 2117 aa, synthetic construct
  REGION 1..2117: note = Description of Artificial Sequence: Synthetic polypeptide
MKRTADGSEFESPKKKRKVDKKYSIGLDIGTNSVGWAVITDEYKVPSKKFKVLGNTDRHSIKKNLIGALLFDSGETAEATRLKRTARRRYTRRKNRICYLQEIFSNEMAKVDDSFFHRLEESFLVEEDKKHERHPIFGNIVDEVAYHEKYPTIYHLRKKLVDSTDKADLRLIYLALAHMIKFRGHFLIEGDLNPDNSDVDKLFIQLVQTYNQLFEENPINASGVDAKAILSARLSKSRRLENLIAQLPGEKKNGLFGNLIALSLGLTPNFKSNFDLAEDAKLQLSKDTYDDDLDNLLAQIGDQYADLFLAAKNLSDAILLSDILRVNTEITKAPLSASMIKRYDEHHQDLTLLKALVRQQLPEKYKEIFFDQSKNGYAGYIDGGASQEEFYKFIKPILEKMDGTEELLVKLNREDLLRKQRTFDNGSIPHQIHLGELHAILRRQEDFYPFLKDNREKIEKILTFRIPYYVGPLARGNSRFAWMTRKSEETITPWNFEEVVDKGASAQSFIERMTNFDKNLPNEKVLPKHSLLYEYFTVYNELTKVKYVTEGMRKPAFLSGEQKKAIVDLLFKTNRKVTVKQLKEDYFKKIECFDSVEISGVEDRFNASLGTYHDLLKIIKDKDFLDNEENEDILEDIVLTLTLFEDREMIEERLKTYAHLFDDKVMKQLKRRRYTGWGRLSRKLINGIRDKQSGKTILDFLKSDGFANRNFMQLIHDDSLTFKEDIQKAQVSGQGDSLHEHIANLAGSPAIKKGILQTVKVVDELVKVMGRHKPENIVIEMARENQTTQKGQKNSRERMKRIEEGIKELGSQILKEHPVENTQLQNEKLYLYYLQNGRDMYVDQELDINRLSDYDVDAIVPQSFLKDDSIDNKVLTRSDKNRGKSDNVPSEEVVKKMKNYWRQLLNAKLITQRKFDNLTKAERGGLSELDKAGFIKRQLVETRQITKHVAQILDSRMNTKYDENDKLIREVKVITLKSKLVSDFRKDFQFYKVREINNYHHAHDAYLNAVVGTALIKKYPKLESEFVYGDYKVYDVRKMIAKSEQEIGKATAKYFFYSNIMNFFKTEITLANGEIRKRPLIETNGETGEIVWDKGRDFATVRKVLSMPQVNIVKKTEVQTGGFSKESILPKRNSDKLIARKKDWDPKKYGGFDSPTVAYSVLVVAKVEKGKSKKLKSVKELLGITIMERSSFEKNPIDFLEAKGYKEVKKDLIIKLPKYSLFELENGRKRMLASAGELQKGNELALPSKYVNFLYLASHYEKLKGSPEDNEQKQLFVEQHKHYLDEIIEQISEFSKRVILADANLDKVLSAYNKHRDKPIREQAENIIHLFTLTNLGAPAAFKYFDTTIDRKRYTSTKEVLDATLIHQSITGLYETRIDLSQLGGDSGGSSGGSSGSETPGTSESATPESSGGSSGGSSTLNIEDEYRLHETSKEPDVSLGSTWLSDFPQAWAETGGMGLAVRQAPLIIPLKATSTPVSIKQYPMSQEARLGIKPHIQRLLDQGILVPCQSPWNTPLLPVKKPGTNDYRPVQDLREVNKRVEDIHPTVPNPYNLLSGLPPSHQWYTVLDLKDAFFCLRLHPTSQPLFAFEWRDPEMGISGQLTWTRLPQGFKNSPTLFNEALHRDLADFRIQHPDLILLQYVDDLLLAATSELDCQQGTRALLQTLGNLGYRASAKKAQICQKQVKYLGYLLKEGQRWLTEARKETVMGQPTPKTPRQLREFLGKAGFCRLFIPGFAEMAAPLYPLTKPGTLFNWGPDQQKAYQEIKQALLTAPALGLPDLTKPFELFVDEKQGYAKGVLTQKLGPWRRPVAYLSKKLDPVAAGWPPCLRMVAAIAVLTKDAGKLTMGQPLVILAPHAVEALVKQPPDRWLSNARMTHYQALLLDTDRVQFGPVVALNPATLLPLPEEGLQHNCLDILAEAHGTRPDLTDQPLPDADHTWYTDGSSLLQEGQRKAGAAVTTETEVIWAKALPAGTSAQRAELIALTQALKMAEGKKLNVYTDSRYAFATAHIHGEIYRRRGWLTSEGKEIKNKDEILALLKALFLPKRLSIIHCPGHQKGHSAEARGNRMADQAARKAAITETPDTSTLLIENSSPSGGSKRTADGSEFEPKKKRKV

SEQ ID NO: 505 - protein, 1803 aa, synthetic construct
  REGION 1..1803: note = Description of Artificial Sequence: Synthetic polypeptide
MKRTADGSEFESPKKKRKVNQKFILGLDIGITSVGYGLIDYETKNIIDAGVRLFPEANVENNEGRRSKRGSRRLKRRRIHRLERVKKLLEDYNLLDQSQIPQSTNPYAIRVKGLSEALSKDELVIALLHIAKRRGIHKIDVIDSNDDVGNELSTKEQLNKNSKLLKDKFVCQIQLERMNEGQVRGEKNRFKTADIIKEIIQLLNVQKNFHQLDENFINKYIELVEMRREYFEGPGKGSPYGWEGDPKAWYETLMGHCTYFPDELRSVKYAYSADLFNALNDLNNLVIQRDGLSKLEYHEKYHIIENVFKQKKKPTLKQIANEINVNPEDIKGYRITKSGKPQFTEFKLYHDLKSVLFDQSILENEDVLDQIAEILTIYQDKDSIKSKLTELDILLNEEDKENIAQLTGYTGTHRLSLKCIRLVLEEQWYSSRNQMEIFTHLNIKPKKINLTAANKIPKAMIDEFILSPVVKRTFGQAINLINKIIEKYGVPEDIIIELARENNSKDKQKFINEMQKKNENTRKRINEIIGKYGNQNAKRLVEKIRLHDEQEGKCLYSLESIPLEDLLNNPNHYEVDHIIPRSVSFDNSYHNKVLVKQSEASKKSNLTPYQYFNSGKSKLSYNQFKQHILNLSKSQDRISKKKKEYLLEERDINKFEVQKEFINRNLVDTRYATRELTNYLKAYFSANNMNVKVKTINGSFTDYLRKVWKFKKERNHGYKHHAEDALIIANADFLFKENKKLKAVNSVLEKPEIESKQLDIQVDSEDNYSEMFIIPKQVQDIKDFRNFKYSHRVDKKPNRQLINDTLYSTRKKDNSTYIVQTIKDIYAKDNTTLKKQFDKSPEKFLMYQHDPRTFEKLEVIMKQYANEKNPLAKYHEETGEYLTKYSKKNNGPIVKSLKYIGNKLGSHLDVTHQFKSSTKKLVKLSIKPYRFDVYLTDKGYKFITISYLDVLKKDNYYYIPEQKYDKLKLGKAIDKNAKFIASFYKNDLIKLDGEIYKIIGVNSDTRNMIELDLPDIRYKEYCELNNIKGEPRIKKTIGKKVNSIEKLTTDVLGNVFTNTQYTKPQLLFKRGNSGGSSGGSSGSETPGTSESATPESSGGSSGGSSTLNIEDEYRLHETSKEPDVSLGSTWLSDFPQAWAETGGMGLAVRQAPLIIPLKATSTPVSIKQYPMSQEARLGIKPHIQRLLDQGILVPCQSPWNTPLLPVKKPGTNDYRPVQDLREVNKRVEDIHPTVPNPYNLLSGLPPSHQWYTVLDLKDAFFCLRLHPTSQPLFAFEWRDPEMGISGQLTWTRLPQGFKNSPTLFNEALHRDLADFRIQHPDLILLQYVDDLLLAATSELDCQQGTRALLQTLGNLGYRASAKKAQICQKQVKYLGYLLKEGQRWLTEARKETVMGQPTPKTPRQLREFLGKAGFCRLFIPGFAEMAAPLYPLTKPGTLFNWGPDQQKAYQEIKQALLTAPALGLPDLTKPFELFVDEKQGYAKGVLTQKLGPWRRPVAYLSKKLDPVAAGWPPCLRMVAAIAVLTKDAGKLTMGQPLVILAPHAVEALVKQPPDRWLSNARMTHYQALLLDTDRVQFGPVVALNPATLLPLPEEGLQHNCLDILAEAHGTRPDLTDQPLPDADHTWYTDGSSLLQEGQRKAGAAVTTETEVIWAKALPAGTSAQRAELIALTQALKMAEGKKLNVYTDSRYAFATAHIHGEIYRRRGWLTSEGKEIKNKDEILALLKALFLPKRLSIIHCPGHQKGHSAEARGNRMADQAARKAAITETPDTSTLLIENSSPSGGSKRTADGSEFEPKKKRKV

SEQ ID NO: 506 - protein, 1801 aa, synthetic construct
  REGION 1..1801: note = Description of Artificial Sequence: Synthetic polypeptide
MKRTADGSEFESPKKKRKVKRNYILGLDIGITSVGYGIIDYETRDVIDAGVRLFKEANVENNEGRRSKRGARRLKRRRRHRIQRVKKLLFDYNLLTDHSELSGINPYEARVKGLSQKLSEEEFSAALLHLAKRRGVHNVNEVEEDTGNELSTKEQISRNSKALEEKYVAELQLERLKKDGEVRGSINRFKTSDYVKEAKQLLKVQKAYHQLDQSFIDTYIDLLETRRTYYEGPGEGSPFGWKDIKEWYEMLMGHCTYFPEELRSVKYAYNADLYNALNDLNNLVITRDENEKLEYYEKFQIIENVFKQKKKPTLKQIAKEILVNEEDIKGYRVTSTGKPEFTNLKVYHDIKDITARKEIIENAELLDQIAKILTIYQSSEDIQEELTNLNSELTQEEIEQISNLKGYTGTHNLSLKAINLILDELWHTNDNQIAIFNRLKLVPKKVDLSQQKEIPTTLVDDFILSPVVKRSFIQSIKVINAIIKKYGLPNDIIIELAREKNSKDAQKMINEMQKRNRQTNERIEEIIRTTGKENAKYLIEKIKLHDMQEGKCLYSLEAIPLEDLLNNPFNYEVDHIIPRSVSFDNSFNNKVLVKQEEASKKGNRTPFQYLSSSDSKISYETFKKHILNLAKGKGRISKTKKEYLLEERDINRFSVQKDFINRNLVDTRYATRGLMNLLRSYFRVNNLDVKVKSINGGFTSFLRRKWKFKKERNKGYKHHAEDALIIANADFIFKEWKKLDKAKKVMENQMFEEKQAESMPEIETEQEYKEIFITPHQIKHIKDFKDYKYSHRVDKKPNRELINDTLYSTRKDDKGNTLIVNNLNGLYDKDNDKLKKLINKSPEKLLMYHHDPQTYQKLKLIMEQYGDEKNPLYKYYEETGNYLTKYSKKDNGPVIKKIKYYGNKLNAHLDITDDYPNSRNKVVKLSLKPYRFDVYLDNGVYKFVTVKNLDVIKKENYYEVNSKCYEEAKKLKKISNQAEFIASFYNNDLIKINGELYRVIGVNNDLLNRIEVNMIDITYREYLENMNDKRPPRIIKTIASKTQSIKKYSTDILGNLYEVKSKKHPQIIKKSGGSSGGSSGSETPGTSESATPESSGGSSGGSSTLNIEDEYRLHETSKEPDVSLGSTWLSDFPQAWAETGGMGLAVRQAPLIIPLKATSTPVSIKQYPMSQEARLGIKPHIQRLLDQGILVPCQSPWNTPLLPVKKPGTNDYRPVQDLREVNKRVEDIHPTVPNPYNLLSGLPPSHQWYTVLDLKDAFFCLRLHPTSQPLFAFEWRDPEMGISGQLTWTRLPQGFKNSPTLFNEALHRDLADFRIQHPDLILLQYVDDLLLAATSELDCQQGTRALLQTLGNLGYRASAKKAQICQKQVKYLGYLLKEGQRWLTEARKETVMGQPTPKTPRQLREFLGKAGFCRLFIPGFAEMAAPLYPLTKPGTLFNWGPDQQKAYQEIKQALLTAPALGLPDLTKPFELFVDEKQGYAKGVLTQKLGPWRRPVAYLSKKLDPVAAGWPPCLRMVAAIAVLTKDAGKLTMGQPLVILAPHAVEALVKQPPDRWLSNARMTHYQALLLDTDRVQFGPVVALNPATLLPLPEEGLQHNCLDILAEAHGTRPDLTDQPLPDADHTWYTDGSSLLQEGQRKAGAAVTTETEVIWAKALPAGTSAQRAELIALTQALKMAEGKKLNVYTDSRYAFATAHIHGEIYRRRGWLTSEGKEIKNKDEILALLKALFLPKRLSIIHCPGHQKGHSAEARGNRMADQAARKAAITETPDTSTLLIENSSPSGGSKRTADGSEFEPKKKRKV

SEQ ID NO: 507 - protein, 2117 aa, synthetic construct
  REGION 1..2117: note = Description of Artificial Sequence: Synthetic polypeptide
MKRTADGSEFESPKKKRKVDKKYSIGLDIGTNSVGWAVITDEYKVPSKKFKVLGNTDRHSIKKNLIGALLFDSGETAEATRLKRTARRRYTRRKNRICYLQEIFSNEMAKVDDSFFHRLEESFLVEEDKKHERHPIFGNIVDEVAYHEKYPTIYHLRKKLVDSTDKADLRLIYLALAHMIKFRGHFLIEGDLNPDNSDVDKLFIQLVQTYNQLFEENPINASGVDAKAILSARLSKSRRLENLIAQLPGEKKNGLFGNLIALSLGLTPNFKSNFDLAEDAKLQLSKDTYDDDLDNLLAQIGDQYADLFLAAKNLSDAILLSDILRVNTEITKAPLSASMIKRYDEHHQDLTLLKALVRQQLPEKYKEIFFDQSKNGYAGYIDGGASQEEFYKFIKPILEKMDGTEELLVKLNREDLLRKQRTFDNGSIPHQIHLGELHAILRRQEDFYPFLKDNREKIEKILTFRIPYYVGPLARGNSRFAWMTRKSEETITPWNFEEVVDKGASAQSFIERMTNFDKNLPNEKVLPKHSLLYEYFTVYNELTKVKYVTEGMRKPAFLSGEQKKAIVDLLFKTNRKVTVKQLKEDYFKKIECFDSVEISGVEDRFNASLGTYHDLLKIIKDKDFLDNEENEDILEDIVLTLTLFEDREMIEERLKTYAHLFDDKVMKQLKRRRYTGWGRLSRKLINGIRDKQSGKTILDFLKSDGFANRNFMQLIHDDSLTFKEDIQKAQVSGQGDSLHEHIANLAGSPAIKKGILQTVKVVDELVKVMGRHKPENIVIEMARENQTTQKGQKNSRERMKRIEEGIKELGSQILKEHPVENTQLQNEKLYLYYLQNGRDMYVDQELDINRLSDYDVDAIVPQSFLKDDSIDNKVLTRSDKNRGKSDNVPSEEVVKKMKNYWRQLLNAKLITQRKFDNLTKAERGGLSELDKAGFIKRQLVETRQITKHVAQILDSRMNTKYDENDKLIREVKVITLKSKLVSDFRKDFQFYKVREINNYHHAHDAYLNAVVGTALIKKYPKLESEFVYGDYKVYDVRKMIAKSEQEIGKATAKYFFYSNIMNFFKTEITLANGEIRKRPLIETNGETGEIVWDKGRDFATVRKVLSMPQVNIVKKTEVQTGGFSKESIRPKRNSDKLIARKKDWDPKKYGGFVSPTVAYSVLVVAKVEKGKSKKLKSVKELLGITIMERSSFEKNPIDFLEAKGYKEVKKDLIIKLPKYSLFELENGRKRMLASARFLQKGNELALPSKYVNFLYLASHYEKLKGSPEDNEQKQLFVEQHKHYLDEIIEQISEFSKRVILADANLDKVLSAYNKHRDKPIREQAENIIHLFTLTNLGAPRAFKYFDTTIDRKVYRSTKEVLDATLIHQSITGLYETRIDLSQLGGDSGGSSGGSSGSETPGTSESATPESSGGSSGGSSTLNIEDEYRLHETSKEPDVSLGSTWLSDFPQAWAETGGMGLAVRQAPLIIPLKATSTPVSIKQYPMSQEARLGIKPHIQRLLDQGILVPCQSPWNTPLLPVKKPGTNDYRPVQDLREVNKRVEDIHPTVPNPYNLLSGLPPSHQWYTVLDLKDAFFCLRLHPTSQPLFAFEWRDPEMGISGQLTWTRLPQGFKNSPTLFNEALHRDLADFRIQHPDLILLQYVDDLLLAATSELDCQQGTRALLQTLGNLGYRASAKKAQICQKQVKYLGYLLKEGQRWLTEARKETVMGQPTPKTPRQLREFLGKAGFCRLFIPGFAEMAAPLYPLTKPGTLFNWGPDQQKAYQEIKQALLTAPALGLPDLTKPFELFVDEKQGYAKGVLTQKLGPWRRPVAYLSKKLDPVAAGWPPCLRMVAAIAVLTKDAGKLTMGQPLVILAPHAVEALVKQPPDRWLSNARMTHYQALLLDTDRVQFGPVVALNPATLLPLPEEGLQHNCLDILAEAHGTRPDLTDQPLPDADHTWYTDGSSLLQEGQRKAGAAVTTETEVIWAKALPAGTSAQRAELIALTQALKMAEGKKLNVYTDSRYAFATAHIHGEIYRRRGWLTSEGKEIKNKDEILALLKALFLPKRLSIIHCPGHQKGHSAEARGNRMADQAARKAAITETPDTSTLLIENSSPSGGSKRTADGSEFEPKKKRKV

SEQ ID NO: 508 - protein, 1857 aa, synthetic construct
  REGION 1..1857: note = Description of Artificial Sequence: Synthetic polypeptide
MKRTADGSEFESPKKKRKVATRSFILKIEPNEEVKKGLWKTHEVLNHGIAYYMNILKLIRQEAIYEHHEQDPKNPKKVSKAEIQAELWDFVLKMQKCNSFTHEVDKDEVFNILRELYEELVPSSVEKKGEANQLSNKFLYPLVDPNSQSGKGTASSGRKPRWYNLKIAGDPSWEEEKKKWEEDKKKDPLAKILGKLAEYGLIPLFIPYTDSNEPIVKEIKWMEKSRNQSVRRLDKDMFIQALERFLSWESWNLKVKEEYEKVEKEYKTLEERIKEDIQALKALEQYEKERQEQLLRDTLNTNEYRLSKRGLRGWREIIQKWLKMDENEPSEKYLEVFKDYQRKHPREAGDYSVYEFLSKKENHFIWRNHPEYPYLYATFCEIDKKKKDAKQQATFTLADPINHPLWVRFEERSGSNLNKYRILTEQLHTEKLKKKLTVQLDRLIYPTESGGWEEKGKVDIVLLPSRQFYNQIFLDIEEKGKHAFTYKDESIKFPLKGTLGGARVQFDRDHLRRYPHKVESGNVGRIYFNMTVNIEPTESPVSKSLKIHRDDFPKVVNFKPKELTEWIKDSKGKKLKSGIESLEIGLRVMSIDLGQRQAAAASIFEVVDQKPDIEGKLFFPIKGTELYAVHRASFNIKLPGETLVKSREVLRKAREDNLKLMNQKLNFLRNVLHFQQFEDITEREKRVTKWISRQENSDVPLVYQDELIQIRELMYKPYKDWVAFLKQLHKRLEVEIGKEVKHWRKSLSDGRKGLYGISLKNIDEIDRTRKFLLRWSLRPTEPGEVRRLEPGQRFAIDQLNHLNALKEDRLKKMANTIIMHALGYCYDVRKKKWQAKNPACQIILFEDLSNYNPYEERSRFENSKLMKWSRREIPRQVALQGEIYGLQVGEVGAQFSSRFHAKTGSPGIRCSVVTKEKLQDNRFFKNLQREGRLTLDKIAVLKEGDLYPDKGGEKFISLSKDRKCVTTHADINAAQNLQKRFWTRTHGFYKVYCKAYQVDGQTVYIPESKDQKQKIIEEFGEGYFILKDGVYEWVNAGKLKIKKGSSKQSSSELVDSDILKDSFDLASELKGEKLMLYRDPSGNVFPSDKWMAAGVFFGKLERILISKLTNQYSISTIEDDSSKQSMSGGSSGGSSGSETPGTSESATPESSGGSSGGSSTLNIEDEYRLHETSKEPDVSLGSTWLSDFPQAWAETGGMGLAVRQAPLIIPLKATSTPVSIKQYPMSQEARLGIKPHIQRLLDQGILVPCQSPWNTPLLPVKKPGTNDYRPVQDLREVNKRVEDIHPTVPNPYNLLSGLPPSHQWYTVLDLKDAFFCLRLHPTSQPLFAFEWRDPEMGISGQLTWTRLPQGFKNSPTLFNEALHRDLADFRIQHPDLILLQYVDDLLLAATSELDCQQGTRALLQTLGNLGYRASAKKAQICQKQVKYLGYLLKEGQRWLTEARKETVMGQPTPKTPRQLREFLGKAGFCRLFIPGFAEMAAPLYPLTKPGTLFNWGPDQQKAYQEIKQALLTAPALGLPDLTKPFELFVDEKQGYAKGVLTQKLGPWRRPVAYLSKKLDPVAAGWPPCLRMVAAIAVLTKDAGKLTMGQPLVILAPHAVEALVKQPPDRWLSNARMTHYQALLLDTDRVQFGPVVALNPATLLPLPEEGLQHNCLDILAEAHGTRPDLTDQPLPDADHTWYTDGSSLLQEGQRKAGAAVTTETEVIWAKALPAGTSAQRAELIALTQALKMAEGKKLNVYTDSRYAFATAHIHGEIYRRRGWLTSEGKEIKNKDEILALLKALFLPKRLSIIHCPGHQKGHSAEARGNRMADQAARKAAITETPDTSTLLIENSSPSGGSKRTADGSEFEPKKKRKV

SEQ ID NO: 509 - protein, 2117 aa, synthetic construct
  REGION 1..2117: note = Description of Artificial Sequence: Synthetic polypeptide
MKRTADGSEFESPKKKRKVDKKYSIGLDIGTNSVGWAVITDEYKVPSKKFKVLGNTDRHSIKKNLIGALLFDSGETAEATRLKRTARRRYTRRKNRICYLQEIFSNEMAKVDDSFFHRLEESFLVEEDKKHERHPIFGNIVDEVAYHEKYPTIYHLRKKLVDSTDKADLRLIYLALAHMIKFRGHFLIEGDLNPDNSDVDKLFIQLVQTYNQLFEENPINASGVDAKAILSARLSKSRRLENLIAQLPGEKKNGLFGNLIALSLGLTPNFKSNFDLAEDAKLQLSKDTYDDDLDNLLAQIGDQYADLFLAAKNLSDAILLSDILRVNTEITKAPLSASMIKRYDEHHQDLTLLKALVRQQLPEKYKEIFFDQSKNGYAGYIDGGASQEEFYKFIKPILEKMDGTEELLVKLNREDLLRKQRTFDNGSIPHQIHLGELHAILRRQEDFYPFLKDNREKIEKILTFRIPYYVGPLARGNSRFAWMTRKSEETITPWNFEEVVDKGASAQSFIERMTNFDKNLPNEKVLPKHSLLYEYFTVYNELTKVKYVTEGMRKPAFLSGEQKKAIVDLLFKTNRKVTVKQLKEDYFKKIECFDSVEISGVEDRFNASLGTYHDLLKIIKDKDFLDNEENEDILEDIVLTLTLFEDREMIEERLKTYAHLFDDKVMKQLKRRRYTGWGRLSRKLINGIRDKQSGKTILDFLKSDGFANRNFMQLIHDDSLTFKEDIQKAQVSGQGDSLHEHIANLAGSPAIKKGILQTVKVVDELVKVMGRHKPENIVIEMARENQTTQKGQKNSRERMKRIEEGIKELGSQILKEHPVENTQLQNEKLYLYYLQNGRDMYVDQELDINRLSDYDVDAIVPQSFLKDDSIDNKVLTRSDKNRGKSDNVPSEEVVKKMKNYWRQLLNAKLITQRKFDNLTKAERGGLSELDKAGFIKRQLVETRQITKHVAQILDSRMNTKYDENDKLIREVKVITLKSKLVSDFRKDFQFYKVREINNYHHAHDAYLNAVVGTALIKKYPKLESEFVYGDYKVYDVRKMIAKSEQEIGKATAKYFFYSNIMNFFKTEITLANGEIRKRPLIETNGETGEIVWDKGRDFATVRKVLSMPQVNIVKKTEVQTGGFSKESILPKRNSDKLIARKKDWDPKKYGGFVSPTVAYSVLVVAKVEKGKSKKLKSVKELLGITIMERSSFEKNPIDFLEAKGYKEVKKDLIIKLPKYSLFELENGRKRMLASARELQKGNELALPSKYVNFLYLASHYEKLKGSPEDNEQKQLFVEQHKHYLDEIIEQISEFSKRVILADANLDKVLSAYNKHRDKPIREQAENIIHLFTLTNLGAPAAFKYFDTTIDRKQYRSTKEVLDATLIHQSITGLYETRIDLSQLGGDSGGSSGGSSGSETPGTSESATPESSGGSSGGSSTLNIEDEYRLHETSKEPDVSLGSTWLSDFPQAWAETGGMGLAVRQAPLIIPLKATSTPVSIKQYPMSQEARLGIKPHIQRLLDQGILVPCQSPWNTPLLPVKKPGTNDYRPVQDLREVNKRVEDIHPTVPNPYNLLSGLPPSHQWYTVLDLKDAFFCLRLHPTSQPLFAFEWRDPEMGISGQLTWTRLPQGFKNSPTLFNEALHRDLADFRIQHPDLILLQYVDDLLLAATSELDCQQGTRALLQTLGNLGYRASAKKAQICQKQVKYLGYLLKEGQRWLTEARKETVMGQPTPKTPRQLREFLGKAGFCRLFIPGFAEMAAPLYPLTKPGTLFNWGPDQQKAYQEIKQALLTAPALGLPDLTKPFELFVDEKQGYAKGVLTQKLGPWRRPVAYLSKKLDPVAAGWPPCLRMVAAIAVLTKDAGKLTMGQPLVILAPHAVEALVKQPPDRWLSNARMTHYQALLLDTDRVQFGPVVALNPATLLPLPEEGLQHNCLDILAEAHGTRPDLTDQPLPDADHTWYTDGSSLLQEGQRKAGAAVTTETEVIWAKALPAGTSAQRAELIALTQALKMAEGKKLNVYTDSRYAFATAHIHGEIYRRRGWLTSEGKEIKNKDEILALLKALFLPKRLSIIHCPGHQKGHSAEARGNRMADQAARKAAITETPDTSTLLIENSSPSGGSKRTADGSEFEPKKKRKV

SEQ ID NO: 510 - protein, 2117 aa, synthetic construct
  REGION 1..2117: note = Description of Artificial Sequence: Synthetic polypeptide
MKRTADGSEFESPKKKRKVDKKYSIGLDIGTNSVGWAVITDEYKVPSKKFKVLGNTDRHSIKKNLIGALLFDSGETAERTRLKRTARRRYTRRKNRICYLQEIFSNEMAKVDDSFFHRLEESFLVEEDKKHERHPIFGNIVDEVAYHEKYPTIYHLRKKLVDSTDKADLRLIYLALAHMIKFRGHFLIEGDLNPDNSDVDKLFIQLVQTYNQLFEENPINASGVDAKAILSARLSKSRRLENLIAQLPGEKKNGLFGNLIALSLGLTPNFKSNFDLAEDAKLQLSKDTYDDDLDNLLAQIGDQYADLFLAAKNLSDAILLSDILRVNTEITKAPLSASMIKRYDEHHQDLTLLKALVRQQLPEKYKEIFFDQSKNGYAGYIDGGASQEEFYKFIKPILEKMDGTEELLVKLNREDLLRKQRTFDNGSIPHQIHLGELHAILRRQEDFYPFLKDNREKIEKILTFRIPYYVGPLARGNSRFAWMTRKSEETITPWNFEEVVDKGASAQSFIERMTNFDKNLPNEKVLPKHSLLYEYFTVYNELTKVKYVTEGMRKPAFLSGEQKKAIVDLLFKTNRKVTVKQLKEDYFKKIECFDSVEISGVEDRFNASLGTYHDLLKIIKDKDFLDNEENEDILEDIVLTLTLFEDREMIEERLKTYAHLFDDKVMKQLKRRRYTGWGRLSRKLINGIRDKQSGKTILDFLKSDGFANRNFMQLIHDDSLTFKEDIQKAQVSGQGDSLHEHIANLAGSPAIKKGILQTVKVVDELVKVMGRHKPENIVIEMARENQTTQKGQKNSRERMKRIEEGIKELGSQILKEHPVENTQLQNEKLYLYYLQNGRDMYVDQELDINRLSDYDVDAIVPQSFLKDDSIDNKVLTRSDKNRGKSDNVPSEEVVKKMKNYWRQLLNAKLITQRKFDNLTKAERGGLSELDKAGFIKRQLVETRQITKHVAQILDSRMNTKYDENDKLIREVKVITLKSKLVSDFRKDFQFYKVREINNYHHAHDAYLNAVVGTALIKKYPKLESEFVYGDYKVYDVRKMIAKSEQEIGKATAKYFFYSNIMNFFKTEITLANGEIRKRPLIETNGETGEIVWDKGRDFATVRKVLSMPQVNIVKKTEVQTGGFSKESIRPKRNSDKLIARKKDWDPKKYGGFLWPTVAYSVLVVAKVEKGKSKKLKSVKELLGITIMERSSFEKNPIDFLEAKGYKEVKKDLIIKLPKYSLFELENGRKRMLASAKQLQKGNELALPSKYVNFLYLASHYEKLKGSPEDNEQKQLFVEQHKHYLDEIIEQISEFSKRVILADANLDKVLSAYNKHRDKPIREQAENIIHLFTLTRLGAPRAFKYFDTTIDPKQYRSTKEVLDATLIHQSITGLYETRIDLSQLGGDSGGSSGGSSGSETPGTSESATPESSGGSSGGSSTLNIEDEYRLHETSKEPDVSLGSTWLSDFPQAWAETGGMGLAVRQAPLIIPLKATSTPVSIKQYPMSQEARLGIKPHIQRLLDQGILVPCQSPWNTPLLPVKKPGTNDYRPVQDLREVNKRVEDIHPTVPNPYNLLSGLPPSHQWYTVLDLKDAFFCLRLHPTSQPLFAFEWRDPEMGISGQLTWTRLPQGFKNSPTLFNEALHRDLADFRIQHPDLILLQYVDDLLLAATSELDCQQGTRALLQTLGNLGYRASAKKAQICQKQVKYLGYLLKEGQRWLTEARKETVMGQPTPKTPRQLREFLGKAGFCRLFIPGFAEMAAPLYPLTKPGTLFNWGPDQQKAYQEIKQALLTAPALGLPDLTKPFELFVDEKQGYAKGVLTQKLGPWRRPVAYLSKKLDPVAAGWPPCLRMVAAIAVLTKDAGKLTMGQPLVILAPHAVEALVKQPPDRWLSNARMTHYQALLLDTDRVQFGPVVALNPATLLPLPEEGLQHNCLDILAEAHGTRPDLTDQPLPDADHTWYTDGSSLLQEGQRKAGAAVTTETEVIWAKALPAGTSAQRAELIALTQALKMAEGKKLNVYTDSRYAFATAHIHGEIYRRRGWLTSEGKEIKNKDEILALLKALFLPKRLSIIHCPGHQKGHSAEARGNRMADQAARKAAITETPDTSTLLIENSSPSGGSKRTADGSEFEPKKKRKV

SEQ ID NO: 511 - protein, 1806 aa, synthetic construct
  REGION 1..1806: note = Description of Artificial Sequence: Synthetic polypeptide
MKRTADGSEFESPKKKRKVNQKFILGLDIGITSVGYGLIDYETKNIIDAGVRLFPEANVENNEGRRSKRGSRRLKRRRIHRLERVKLLLTEYDLINKEQIPTSNNPYQIRVKGLSEILSKDELAIALLHLAKRRGIHNVDVAADKEETASDSLSTKDQINKNAKFLESRYVCELQKERLENEGHVRGVENRFLTKDIVREAKKIIDTQMQYYPEIDETFKEKYISLVETRREYFEGPGQGSPFGWNGDLKKWYEMLMGHCTYFPQELRSVKYAYSADLFNALNDLNNLIIQRDNSEKLEYHEKYHIIENVFKQKKKPTLKQIAKEIGVNPEDIKGYRITKSGTPEFTSFKLFHDLKKVVKDHAILDDIDLLNQIAEILTIYQDKDSIVAELGQLEYLMSEADKQSISELTGYTGTHSLSLKCMNMIIDELWHSSMNQMEVFTYLNMRPKKYELKGYQRIPTDMIDDAILSPVVKRTFIQSINVINKVIEKYGIPEDIIIELARENNSDDRKKFINNLQKKNEATRKRINEIIGQTGNQNAKRIVEKIRLHDQQEGKCLYSLESIPLEDLLNNPNHYEVDHIIPRSVSFDNSYHNKVLVKQSEASKKSNLTPYQYFNSGKSKLSYNQFKQHILNLSKSQDRISKKKKEYLLEERDINKFEVQKEFINRNLVDTRYATRELTNYLKAYFSANNMNVKVKTINGSFTDYLRKVWKFKKERNHGYKHHAEDALIIANADFLFKENKKLKAVNSVLEKPEIETKQLDIQVDSEDNYSEMFIIPKQVQDIKDFRNFKYSHRVDKKPNRQLINDTLYSTRKKDNSTYIVQTIKDIYAKDNTTLKKQFDKSPEKFLMYQHDPRTFEKLEVIMKQYANEKNPLAKYHEETGEYLTKYSKKNNGPIVKSLKYIGNKLGSHLDVTHQFKSSTKKLVKLSIKNYRFDVYLTEKGYKFVTIAYLNVFKKDNYYYIPKDKYQELKEKKKIKDTDQFIASFYKNDLIKLNGDLYKIIGVNSDDRNIIELDYYDIKYKDYCEINNIKGEPRIKKTIGKKTESIEKFTTDVLGNLYLHSTEKAPQLIFKRGLSGGSSGGSSGSETPGTSESATPESSGGSSGGSSTLNIEDEYRLHETSKEPDVSLGSTWLSDFPQAWAETGGMGLAVRQAPLIIPLKATSTPVSIKQYPMSQEARLGIKPHIQRLLDQGILVPCQSPWNTPLLPVKKPGTNDYRPVQDLREVNKRVEDIHPTVPNPYNLLSGLPPSHQWYTVLDLKDAFFCLRLHPTSQPLFAFEWRDPEMGISGQLTWTRLPQGFKNSPTLFNEALHRDLADFRIQHPDLILLQYVDDLLLAATSELDCQQGTRALLQTLGNLGYRASAKKAQICQKQVKYLGYLLKEGQRWLTEARKETVMGQPTPKTPRQLREFLGKAGFCRLFIPGFAEMAAPLYPLTKPGTLFNWGPDQQKAYQEIKQALLTAPALGLPDLTKPFELFVDEKQGYAKGVLTQKLGPWRRPVAYLSKKLDPVAAGWPPCLRMVAAIAVLTKDAGKLTMGQPLVILAPHAVEALVKQPPDRWLSNARMTHYQALLLDTDRVQFGPVVALNPATLLPLPEEGLQHNCLDILAEAHGTRPDLTDQPLPDADHTWYTDGSSLLQEGQRKAGAAVTTETEVIWAKALPAGTSAQRAELIALTQALKMAEGKKLNVYTDSRYAFATAHIHGEIYRRRGWLTSEGKEIKNKDEILALLKALFLPKRLSIIHCPGHQKGHSAEARGNRMADQAARKAAITETPDTSTLLIENSSPSGGSKRTADGSEFEPKKKRKV

SEQ ID NO: 512 - protein, 1806 aa, synthetic construct
  REGION 1..1806: note = Description of Artificial Sequence: Synthetic polypeptide
MKRTADGSEFESPKKKRKVNQKFILGLDIGITSVGYGLIDYETKNIIDAGVRLFPEANVENNEGRRSKRGSRRLKRRRIHRLERVKLLLTEYDLINKEQIPTSNNPYQIRVKGLSEILSKDELAIALLHLAKRRGIHNVDVAADKEETASDSLSTKDQINKNAKFLESRYVCELQKERLENEGHVRGVENRFLTKDIVREAKKIIDTQMQYYPEIDETFKEKYISLVETRREYFEGPGQGSPFGWNGDLKKWYEMLMGHCTYFPQELRSVKYAYSADLFNALNDLNNLIIQRDNSEKLEYHEKYHIIENVFKQKKKPTLKQIAKEIGVNPEDIKGYRITKSGTPEFTSFKLFHDLKKVVKDHAILDDIDLLNQIAEILTIYQDKDSIVAELGQLEYLMSEADKQSISELTGYTGTHSLSLKCMNMIIDELWHSSMNQMEVFTYLNMRPKKYELKGYQRIPTDMIDDAILSPVVKRTFIQSINVINKVIEKYGIPEDIIIELARENNSDDRKKFINNLQKKNEATRKRINEIIGQTGNQNAKRIVEKIRLHDQQEGKCLYSLESIPLEDLLNNPNHYEVDHIIPRSVSFDNSYHNKVLVKQSEASKKSNLTPYQYFNSGKSKLSYNQFKQHILNLSKSQDRISKKKKEYLLEERDINKFEVQKEFINRNLVDTRYATRELTSYLKAYFSANNMDVKVKTINGSFTNHLRKVWRFDKYRNHGYKHHAEDALIIANADFLFKENKKLQNTNKILEKPTIENNTKKVTVEKEEDYNNVFETPKLVEDIKQYRDYKFSHRVDKKPNRQLINDTLYSTRMKDEHDYIVQTITDIYGKDNTNLKKQFNKNPEKFLMYQNDPKTFEKLSIIMKQYSDEKNPLAKYYEETGEYLTKYSKKNNGPIVKKIKLLGNKVGNHLDVTNKYENSTKKLVKLSIKNYRFDVYLTEKGYKFVTIAYLNVFKKDNYYYIPKDKYQELKEKKKIKDTDQFIASFYKNDLIKLNGDLYKIIGVNSDDRNIIELDYYDIKYKDYCEINNIKGEPRIKKTIGKKTESIEKFTTDVLGNLYLHSTEKAPQLIFKRGLSGGSSGGSSGSETPGTSESATPESSGGSSGGSSTLNIEDEYRLHETSKEPDVSLGSTWLSDFPQAWAETGGMGLAVRQAPLIIPLKATSTPVSIKQYPMSQEARLGIKPHIQRLLDQGILVPCQSPWNTPLLPVKKPGTNDYRPVQDLREVNKRVEDIHPTVPNPYNLLSGLPPSHQWYTVLDLKDAFFCLRLHPTSQPLFAFEWRDPEMGISGQLTWTRLPQGFKNSPTLFNEALHRDLADFRIQHPDLILLQYVDDLLLAATSELDCQQGTRALLQTLGNLGYRASAKKAQICQKQVKYLGYLLKEGQRWLTEARKETVMGQPTPKTPRQLREFLGKAGFCRLFIPGFAEMAAPLYPLTKPGTLFNWGPDQQKAYQEIKQALLTAPALGLPDLTKPFELFVDEKQGYAKGVLTQKLGPWRRPVAYLSKKLDPVAAGWPPCLRMVAAIAVLTKDAGKLTMGQPLVILAPHAVEALVKQPPDRWLSNARMTHYQALLLDTDRVQFGPVVALNPATLLPLPEEGLQHNCLDILAEAHGTRPDLTDQPLPDADHTWYTDGSSLLQEGQRKAGAAVTTETEVIWAKALPAGTSAQRAELIALTQALKMAEGKKLNVYTDSRYAFATAHIHGEIYRRRGWLTSEGKEIKNKDEILALLKALFLPKRLSIIHCPGHQKGHSAEARGNRMADQAARKAAITETPDTSTLLIENSSPSGGSKRTADGSEFEPKKKRKV

SEQ ID NO: 513 - protein, 2117 aa, synthetic construct
  REGION 1..2117: note = Description of Artificial Sequence: Synthetic polypeptide
MKRTADGSEFESPKKKRKVDKKYSIGLDIGTNSVGWAVITDEYKVPSKKFKVLGNTDRHSIKKNLIGALLFDSGETAEATRLKRTARRRYTRRKNRICYLQEIFSNEMAKVDDSFFHRLEESFLVEEDKKHERHPIFGNIVDEVAYHEKYPTIYHLRKKLVDSTDKADLRLIYLALAHMIKFRGHFLIEGDLNPDNSDVDKLFIQLVQTYNQLFEENPINASGVDAKAILSARLSKSRRLENLIAQLPGEKKNGLFGNLIALSLGLTPNFKSNFDLAEDAKLQLSKDTYDDDLDNLLAQIGDQYADLFLAAKNLSDAILLSDILRVNTEITKAPLSASMIKRYDEHHQDLTLLKALVRQQLPEKYKEIFFDQSKNGYAGYIDGGASQEEFYKFIKPILEKMDGTEELLVKLNREDLLRKQRTFDNGSIPHQIHLGELHAILRRQEDFYPFLKDNREKIEKILTFRIPYYVGPLARGNSRFAWMTRKSEETITPWNFEEVVDKGASAQSFIERMTNFDKNLPNEKVLPKHSLLYEYFTVYNELTKVKYVTEGMRKPAFLSGEQKKAIVDLLFKTNRKVTVKQLKEDYFKKIECFDSVEISGVEDRFNASLGTYHDLLKIIKDKDFLDNEENEDILEDIVLTLTLFEDREMIEERLKTYAHLFDDKVMKQLKRRRYTGWGRLSRKLINGIRDKQSGKTILDFLKSDGFANRNFMQLIHDDSLTFKEDIQKAQVSGQGDSLHEHIANLAGSPAIKKGILQTVKVVDELVKVMGRHKPENIVIEMARENQTTQKGQKNSRERMKRIEEGIKELGSQILKEHPVENTQLQNEKLYLYYLQNGRDMYVDQELDINRLSDYDVDHIVPQSFLKDDSIDNKVLTRSDKNRGKSDNVPSEEVVKKMKNYWRQLLNAKLITQRKFDNLTKAERGGLSELDKAGFIKRQLVETRQITKHVAQILDSRMNTKYDENDKLIREVKVITLKSKLVSDFRKDFQFYKVREINNYHHAHDAYLNAVVGTALIKKYPKLESEFVYGDYKVYDVRKMIAKSEQEIGKATAKYFFYSNIMNFFKTEITLANGEIRKRPLIETNGETGEIVWDKGRDFATVRKVLSMPQVNIVKKTEVQTGGFSKESILPKRNSDKLIARKKDWDPKKYGGFLWPTVAYSVLVVAKVEKGKSKKLKSVKELLGITIMERSSFEKNPIDFLEAKGYKEVKKDLIIKLPKYSLFELENGRKRMLASAKQLQKGNELALPSKYVNFLYLASHYEKLKGSPEDNEQKQLFVEQHKHYLDEIIEQISEFSKRVILADANLDKVLSAYNKHRDKPIREQAENIIHLFTLTNLGAPAAFKYFDTTIDRKQYRSTKEVLDATLIHQSITGLYETRIDLSQLGGDSGGSSGGSSGSETPGTSESATPESSGGSSGGSSTLNIEDEYRLHETSKEPDVSLGSTWLSDFPQAWAETGGMGLAVRQAPLIIPLKATSTPVSIKQYPMSQEARLGIKPHIQRLLDQGILVPCQSPWNTPLLPVKKPGTNDYRPVQDLREVNKRVEDIHPTVPNPYNLLSGLPPSHQWYTVLDLKDAFFCLRLHPTSQPLFAFEWRDPEMGISGQLTWTRLPQGFKNSPTLFNEALHRDLADFRIQHPDLILLQYVDDLLLAATSELDCQQGTRALLQTLGNLGYRASAKKAQICQKQVKYLGYLLKEGQRWLTEARKETVMGQPTPKTPRQLREFLGKAGFCRLFIPGFAEMAAPLYPLTKPGTLFNWGPDQQKAYQEIKQALLTAPALGLPDLTKPFELFVDEKQGYAKGVLTQKLGPWRRPVAYLSKKLDPVAAGWPPCLRMVAAIAVLTKDAGKLTMGQPLVILAPHAVEALVKQPPDRWLSNARMTHYQALLLDTDRVQFGPVVALNPATLLPLPEEGLQHNCLDILAEAHGTRPDLTDQPLPDADHTWYTDGSSLLQEGQRKAGAAVTTETEVIWAKALPAGTSAQRAELIALTQALKMAEGKKLNVYTDSRYAFATAHIHGEIYRRRGWLTSEGKEIKNKDEILALLKALFLPKRLSIIHCPGHQKGHSAEARGNRMADQAARKAAITETPDTSTLLIENSSPSGGSKRTADGSEFEPKKKRKV

SEQ ID NO: 514 - protein, 2099 aa, synthetic construct
  REGION 1..2099: note = Description of Artificial Sequence: Synthetic polypeptide
MDKKYSIGLDIGTNSVGWAVITDEYKVPSKKFKVLGNTDRHSIKKNLIGALLFDSGETAEATRLKRTARRRYTRRKNRICYLQEIFSNEMAKVDDSFFHRLEESFLVEEDKKHERHPIFGNIVDEVAYHEKYPTIYHLRKKLVDSTDKADLRLIYLALAHMIKFRGHFLIEGDLNPDNSDVDKLFIQLVQTYNQLFEENPINASGVDAKAILSARLSKSRRLENLIAQLPGEKKNGLFGNLIALSLGLTPNFKSNFDLAEDAKLQLSKDTYDDDLDNLLAQIGDQYADLFLAAKNLSDAILLSDILRVNTEITKAPLSASMIKRYDEHHQDLTLLKALVRQQLPEKYKEIFFDQSKNGYAGYIDGGASQEEFYKFIKPILEKMDGTEELLVKLNREDLLRKQRTFDNGSIPHQIHLGELHAILRRQEDFYPFLKDNREKIEKILTFRIPYYVGPLARGNSRFAWMTRKSEETITPWNFEEVVDKGASAQSFIERMTNFDKNLPNEKVLPKHSLLYEYFTVYNELTKVKYVTEGMRKPAFLSGEQKKAIVDLLFKTNRKVTVKQLKEDYFKKIECFDSVEISGVEDRFNASLGTYHDLLKIIKDKDFLDNEENEDILEDIVLTLTLFEDREMIEERLKTYAHLFDDKVMKQLKRRRYTGWGRLSRKLINGIRDKQSGKTILDFLKSDGFANRNFMQLIHDDSLTFKEDIQKAQVSGQGDSLHEHIANLAGSPAIKKGILQTVKVVDELVKVMGRHKPENIVIEMARENQTTQKGQKNSRERMKRIEEGIKELGSQILKEHPVENTQLQNEKLYLYYLQNGRDMYVDQELDINRLSDYDVDHIVPQSFLKDDSIDNKVLTRSDKNRGKSDNVPSEEVVKKMKNYWRQLLNAKLITQRKFDNLTKAERGGLSELDKAGFIKRQLVETRQITKHVAQILDSRMNTKYDENDKLIREVKVITLKSKLVSDFRKDFQFYKVREINNYHHAHDAYLNAVVGTALIKKYPKLESEFVYGDYKVYDVRKMIAKSEQEIGKATAKYFFYSNIMNFFKTEITLANGEIRKRPLIETNGETGEIVWDKGRDFATVRKVLSMPQVNIVKKTEVQTGGFSKESILPKRNSDKLIARKKDWDPKKYGGFVSPTVAYSVLVVAKVEKGKSKKLKSVKELLGITIMERSSFEKNPIDFLEAKGYKEVKKDLIIKLPKYSLFELENGRKRMLASARELQKGNELALPSKYVNFLYLASHYEKLKGSPEDNEQKQLFVEQHKHYLDEIIEQISEFSKRVILADANLDKVLSAYNKHRDKPIREQAENIIHLFTLTNLGAPAAFKYFDTTIDRKQYRSTKEVLDATLIHQSITGLYETRIDLSQLGGDSGGSSGGSSGSETPGTSESATPESSGGSSGGSSTLNIEDEYRLHETSKEPDVSLGSTWLSDFPQAWAETGGMGLAVRQAPLIIPLKATSTPVSIKQYPMSQEARLGIKPHIQRLLDQGILVPCQSPWNTPLLPVKKPGTNDYRPVQDLREVNKRVEDIHPTVPNPYNLLSGLPPSHQWYTVLDLKDAFFCLRLHPTSQPLFAFEWRDPEMGISGQLTWTRLPQGFKNSPTLFNEALHRDLADFRIQHPDLILLQYVDDLLLAATSELDCQQGTRALLQTLGNLGYRASAKKAQICQKQVKYLGYLLKEGQRWLTEARKETVMGQPTPKTPRQLREFLGKAGFCRLFIPGFAEMAAPLYPLTKPGTLFNWGPDQQKAYQEIKQALLTAPALGLPDLTKPFELFVDEKQGYAKGVLTQKLGPWRRPVAYLSKKLDPVAAGWPPCLRMVAAIAVLTKDAGKLTMGQPLVILAPHAVEALVKQPPDRWLSNARMTHYQALLLDTDRVQFGPVVALNPATLLPLPEEGLQHNCLDILAEAHGTRPDLTDQPLPDADHTWYTDGSSLLQEGQRKAGAAVTTETEVIWAKALPAGTSAQRAELIALTQALKMAEGKKLNVYTDSRYAFATAHIHGEIYRRRGWLTSEGKEIKNKDEILALLKALFLPKRLSIIHCPGHQKGHSAEARGNRMADQAARKAAITETPDTSTLLIENSSPSGGSKRTADGSEFEPKKKRKV

SEQ ID NO: 515 - protein, 2074 aa, synthetic construct
  REGION 1..2074: note = Description of Artificial Sequence: Synthetic polypeptide
MSDKKYSIGLAIGTNSVGWAVITDEYKVPSKKFKVLGNTDRHSIKKNLIGALLFDSGETAEATRLKRTARRRYTRRKNRICYLQEIFSNEMAKVDDSFFHRLEESFLVEEDKKHERHPIFGNIVDEVAYHEKYPTIYHLRKKLVDSTDKADLRLIYLALAHMIKFRGHFLIEGDLNPDNSDVDKLFIQLVQTYNQLFEENPINASGVDAKAILSARLSKSRRLENLIAQLPGEKKNGLFGNLIALSLGLTPNFKSNFDLAEDAKLQLSKDTYDDDLDNLLAQIGDQYADLFLAAKNLSDAILLSDILRVNTEITKAPLSASMIKRYDEHHQDLTLLKALVRQQLPEKYKEIFFDQSKNGYAGYIDGGASQEEFYKFIKPILEKMDGTEELLVKLNREDLLRKQRTFDNGSIPHQIHLGELHAILRRQEDFYPFLKDNREKIEKILTFRIPYYVGPLARGNSRFAWMTRKSEETITPWNFEEVVDKGASAQSFIERMTNFDKNLPNEKVLPKHSLLYEYFTVYNELTKVKYVTEGMRKPAFLSGEQKKAIVDLLFKTNRKVTVKQLKEDYFKKIECFDSVEISGVEDRFNASLGTYHDLLKIIKDKDFLDNEENEDILEDIVLTLTLFEDREMIEERLKTYAHLFDDKVMKQLKRRRYTGWGRLSRKLINGIRDKQSGKTILDFLKSDGFANRNFMQLIHDDSLTFKEDIQKAQVSGQGDSLHEHIANLAGSPAIKKGILQTVKVVDELVKVMGRHKPENIVIEMARENQTTQKGQKNSRERMKRIEEGIKELGSQILKEHPVENTQLQNEKLYLYYLQNGRDMYVDQELDINRLSDYDVDHIVPQSFLKDDSIDNKVLTRSDKNRGKSDNVPSEEVVKKMKNYWRQLLNAKLITQRKFDNLTKAERGGLSELDKAGFIKRQLVETRQITKHVAQILDSRMNTKYDENDKLIREVKVITLKSKLVSDFRKDFQFYKVREINNYHHAHDAYLNAVVGTALIKKYPKLESEFVYGDYKVYDVRKMIAKSEQEIGKATAKYFFYSNIMNFFKTEITLANGEIRKRPLIETNGETGEIVWDKGRDFATVRKVLSMPQVNIVKKTEVQTGGFSKESIRPKRNSDKLIARKKDWDPKKYGGFVSPTVAYSVLVVAKVEKGKSKKLKSVKELLGITIMERSSFEKNPIDFLEAKGYKEVKKDLIIKLPKYSLFELENGRKRMLASARFLQKGNELALPSKYVNFLYLASHYEKLKGSPEDNEQKQLFVEQHKHYLDEIIEQISEFSKRVILADANLDKVLSAYNKHRDKPIREQAENIIHLFTLTNLGAPRAFKYFDTTIDRKVYRSTKEVLDATLIHQSITGLYETRIDLSQLGGDLGGSGGSGGSGGSGGSGGSGGSGGSGGSTLNIEDEYRLHETSKEPDVSLGSTWLSDFPQAWAETGGMGLAVRQAPLIIPLKATSTPVSIKQYPMSQEARLGIKPHIQRLLDQGILVPCQSPWNTPLLPVKKPGTNDYRPVQDLREVNKRVEDIHPTVPNPYNLLSGLPPSHQWYTVLDLKDAFFCLRLHPTSQPLFAFEWRDPEMGISGQLTWTRLPQGFKNSPTLFNEALHRDLADFRIQHPDLILLQYVDDLLLAATSELDCQQGTRALLQTLGNLGYRASAKKAQICQKQVKYLGYLLKEGQRWLTEARKETVMGQPTPKTPRQLREFLGKAGFCRLFIPGFAEMAAPLYPLTKPGTLFNWGPDQQKAYQEIKQALLTAPALGLPDLTKPFELFVDEKQGYAKGVLTQKLGPWRRPVAYLSKKLDPVAAGWPPCLRMVAAIAVLTKDAGKLTMGQPLVILAPHAVEALVKQPPDRWLSNARMTHYQALLLDTDRVQFGPVVALNPATLLPLPEEGLQHNCLDILAEAHGTRPDLTDQPLPDADHTWYTDGSSLLQEGQRKAGAAVTTETEVIWAKALPAGTSAQRAELIALTQALKMAEGKKLNVYTDSRYAFATAHIHGEIYRRRGWLTSEGKEIKNKDEILALLKALFLPKRLSIIHCPGHQKGHSAEARGNRMADQAARKAAITETPDTSTLLIENSSP

SEQ ID NO: 516 - protein, 2099 aa, synthetic construct
  REGION 1..2099: note = Description of Artificial Sequence: Synthetic polypeptide
MDKKYSIGLDIGTNSVGWAVITDEYKVPSKKFKVLGNTDRHSIKKNLIGALLFDSGETAEATRLKRTARRRYTRRKNRICYLQEIFSNEMAKVDDSFFHRLEESFLVEEDKKHERHPIFGNIVDEVAYHEKYPTIYHLRKKLVDSTDKADLRLIYLALAHMIKFRGHFLIEGDLNPDNSDVDKLFIQLVQTYNQLFEENPINASGVDAKAILSARLSKSRRLENLIAQLPGEKKNGLFGNLIALSLGLTPNFKSNFDLAEDAKLQLSKDTYDDDLDNLLAQIGDQYADLFLAAKNLSDAILLSDILRVNTEITKAPLSASMIKRYDEHHQDLTLLKALVRQQLPEKYKEIFFDQSKNGYAGYIDGGASQEEFYKFIKPILEKMDGTEELLVKLNREDLLRKQRTFDNGSIPHQIHLGELHAILRRQEDFYPFLKDNREKIEKILTFRIPYYVGPLARGNSRFAWMTRKSEETITPWNFEEVVDKGASAQSFIERMTNFDKNLPNEKVLPKHSLLYEYFTVYNELTKVKYVTEGMRKPAFLSGEQKKAIVDLLFKTNRKVTVKQLKEDYFKKIECFDSVEISGVEDRFNASLGTYHDLLKIIKDKDFLDNEENEDILEDIVLTLTLFEDREMIEERLKTYAHLFDDKVMKQLKRRRYTGWGRLSRKLINGIRDKQSGKTILDFLKSDGFANRNFMQLIHDDSLTFKEDIQKAQVSGQGDSLHEHIANLAGSPAIKKGILQTVKVVDELVKVMGRHKPENIVIEMARENQTTQKGQKNSRERMKRIEEGIKELGSQILKEHPVENTQLQNEKLYLYYLQNGRDMYVDQELDINRLSDYDVDHIVPQSFLKDDSIDNKVLTRSDKNRGKSDNVPSEEVVKKMKNYWRQLLNAKLITQRKFDNLTKAERGGLSELDKAGFIKRQLVETRQITKHVAQILDSRMNTKYDENDKLIREVKVITLKSKLVSDFRKDFQFYKVREINNYHHAHDAYLNAVVGTALIKKYPKLESEFVYGDYKVYDVRKMIAKSEQEIGKATAKYFFYSNIMNFFKTEITLANGEIRKRPLIETNGETGEIVWDKGRDFATVRKVLSMPQVNIVKKTEVQTGGFSKESILPKRNSDKLIARKKDWDPKKYGGFLWPTVAYSVLVVAKVEKGKSKKLKSVKELLGITIMERSSFEKNPIDFLEAKGYKEVKKDLIIKLPKYSLFELENGRKRMLASAKQLQKGNELALPSKYVNFLYLASHYEKLKGSPEDNEQKQLFVEQHKHYLDEIIEQISEFSKRVILADANLDKVLSAYNKHRDKPIREQAENIIHLFTLTNLGAPAAFKYFDTTIDRKQYRSTKEVLDATLIHQSITGLYETRIDLSQLGGDSGGSSGGSSGSETPGTSESATPESSGGSSGGSSTLNIEDEYRLHETSKEPDVSLGSTWLSDFPQAWAETGGMGLAVRQAPLIIPLKATSTPVSIKQYPMSQEARLGIKPHIQRLLDQGILVPCQSPWNTPLLPVKKPGTNDYRPVQDLREVNKRVEDIHPTVPNPYNLLSGLPPSHQWYTVLDLKDAFFCLRLHPTSQPLFAFEWRDPEMGISGQLTWTRLPQGFKNSPTLFNEALHRDLADFRIQHPDLILLQYVDDLLLAATSELDCQQGTRALLQTLGNLGYRASAKKAQICQKQVKYLGYLLKEGQRWLTEARKETVMGQPTPKTPRQLREFLGKAGFCRLFIPGFAEMAAPLYPLTKPGTLFNWGPDQQKAYQEIKQALLTAPALGLPDLTKPFELFVDEKQGYAKGVLTQKLGPWRRPVAYLSKKLDPVAAGWPPCLRMVAAIAVLTKDAGKLTMGQPLVILAPHAVEALVKQPPDRWLSNARMTHYQALLLDTDRVQFGPVVALNPATLLPLPEEGLQHNCLDILAEAHGTRPDLTDQPLPDADHTWYTDGSSLLQEGQRKAGAAVTTETEVIWAKALPAGTSAQRAELIALTQALKMAEGKKLNVYTDSRYAFATAHIHGEIYRRRGWLTSEGKEIKNKDEILALLKALFLPKRLSIIHCPGHQKGHSAEARGNRMADQAARKAAITETPDTSTLLIENSSPSGGSKRTADGSEFEPKKKRKV

SEQ ID NO: 517 - protein, 2099 aa, synthetic construct
  REGION 1..2099: note = Description of Artificial Sequence: Synthetic polypeptide
MDKKYSIGLDIGTNSVGWAVITDEYKVPSKKFKVLGNTDRHSIKKNLIGALLFDSGETAERTRLKRTARRRYTRRKNRICYLQEIFSNEMAKVDDSFFHRLEESFLVEEDKKHERHPIFGNIVDEVAYHEKYPTIYHLRKKLVDSTDKADLRLIYLALAHMIKFRGHFLIEGDLNPDNSDVDKLFIQLVQTYNQLFEENPINASGVDAKAILSARLSKSRRLENLIAQLPGEKKNGLFGNLIALSLGLTPNFKSNFDLAEDAKLQLSKDTYDDDLDNLLAQIGDQYADLFLAAKNLSDAILLSDILRVNTEITKAPLSASMIKRYDEHHQDLTLLKALVRQQLPEKYKEIFFDQSKNGYAGYIDGGASQEEFYKFIKPILEKMDGTEELLVKLNREDLLRKQRTFDNGSIPHQIHLGELHAILRRQEDFYPFLKDNREKIEKILTFRIPYYVGPLARGNSRFAWMTRKSEETITPWNFEEVVDKGASAQSFIERMTNFDKNLPNEKVLPKHSLLYEYFTVYNELTKVKYVTEGMRKPAFLSGEQKKAIVDLLFKTNRKVTVKQLKEDYFKKIECFDSVEISGVEDRFNASLGTYHDLLKIIKDKDFLDNEENEDILEDIVLTLTLFEDREMIEERLKTYAHLFDDKVMKQLKRRRYTGWGRLSRKLINGIRDKQSGKTILDFLKSDGFANRNFMQLIHDDSLTFKEDIQKAQVSGQGDSLHEHIANLAGSPAIKKGILQTVKVVDELVKVMGRHKPENIVIEMARENQTTQKGQKNSRERMKRIEEGIKELGSQILKEHPVENTQLQNEKLYLYYLQNGRDMYVDQELDINRLSDYDVDHIVPQSFLKDDSIDNKVLTRSDKNRGKSDNVPSEEVVKKMKNYWRQLLNAKLITQRKFDNLTKAERGGLSELDKAGFIKRQLVETRQITKHVAQILDSRMNTKYDENDKLIREVKVITLKSKLVSDFRKDFQFYKVREINNYHHAHDAYLNAVVGTALIKKYPKLESEFVYGDYKVYDVRKMIAKSEQEIGKATAKYFFYSNIMNFFKTEITLANGEIRKRPLIETNGETGEIVWDKGRDFATVRKVLSMPQVNIVKKTEVQTGGFSKESIRPKRNSDKLIARKKDWDPKKYGGFLWPTVAYSVLVVAKVEKGKSKKLKSVKELLGITIMERSSFEKNPIDFLEAKGYKEVKKDLIIKLPKYSLFELENGRKRMLASAKQLQKGNELALPSKYVNFLYLASHYEKLKGSPEDNEQKQLFVEQHKHYLDEIIEQISEFSKRVILADANLDKVLSAYNKHRDKPIREQAENIIHLFTLTRLGAPRAFKYFDTTIDPKQYRSTKEVLDATLIHQSITGLYETRIDLSQLGGDSGGSSGGSSGSETPGTSESATPESSGGSSGGSSTLNIEDEYRLHETSKEPDVSLGSTWLSDFPQAWAETGGMGLAVRQAPLIIPLKATSTPVSIKQYPMSQEARLGIKPHIQRLLDQGILVPCQSPWNTPLLPVKKPGTNDYRPVQDLREVNKRVEDIHPTVPNPYNLLSGLPPSHQWYTVLDLKDAFFCLRLHPTSQPLFAFEWRDPEMGISGQLTWTRLPQGFKNSPTLFNEALHRDLADFRIQHPDLILLQYVDDLLLAATSELDCQQGTRALLQTLGNLGYRASAKKAQICQKQVKYLGYLLKEGQRWLTEARKETVMGQPTPKTPRQLREFLGKAGFCRLFIPGFAEMAAPLYPLTKPGTLFNWGPDQQKAYQEIKQALLTAPALGLPDLTKPFELFVDEKQGYAKGVLTQKLGPWRRPVAYLSKKLDPVAAGWPPCLRMVAAIAVLTKDAGKLTMGQPLVILAPHAVEALVKQPPDRWLSNARMTHYQALLLDTDRVQFGPVVALNPATLLPLPEEGLQHNCLDILAEAHGTRPDLTDQPLPDADHTWYTDGSSLLQEGQRKAGAAVTTETEVIWAKALPAGTSAQRAELIALTQALKMAEGKKLNVYTDSRYAFATAHIHGEIYRRRGWLTSEGKEIKNKDEILALLKALFLPKRLSIIHCPGHQKGHSAEARGNRMADQAARKAAITETPDTSTLLIENSSPSGGSKRTADGSEFEPKKKRKV

SEQ ID NO: 518 - protein, 1800 aa, synthetic construct
  REGION 1..1800: note = Description of Artificial Sequence: Synthetic polypeptide
MAPKKKRKVGIHGVPAAKRNYILGLDIGITSVGYGIIDYETRDVIDAGVRLFKEANVENNEGRRSKRGARRLKRRRRHRIQRVKKLLFDYNLLTDHSELSGINPYEARVKGLSQKLSEEEFSAALLHLAKRRGVHNVNEVEEDTGNELSTKEQISRNSKALEEKYVAELQLERLKKDGEVRGSINRFKTSDYVKEAKQLLKVQKAYHQLDQSFIDTYIDLLETRRTYYEGPGEGSPFGWKDIKEWYEMLMGHCTYFPEELRSVKYAYNADLYNALNDLNNLVITRDENEKLEYYEKFQIIENVFKQKKKPTLKQIAKEILVNEEDIKGYRVTSTGKPEFTNLKVYHDIKDITARKEIIENAELLDQIAKILTIYQSSEDIQEELTNLNSELTQEEIEQISNLKGYTGTHNLSLKAINLILDELWHTNDNQIAIFNRLKLVPKKVDLSQQKEIPTTLVDDFILSPVVKRSFIQSIKVINAIIKKYGLPNDIIIELAREKNSKDAQKMINEMQKRNRQTNERIEEIIRTTGKENAKYLIEKIKLHDMQEGKCLYSLEAIPLEDLLNNPFNYEVDHIIPRSVSFDNSFNNKVLVKQEENSKKGNRTPFQYLSSSDSKISYETFKKHILNLAKGKGRISKTKKEYLLEERDINRFSVQKDFINRNLVDTRYATRGLMNLLRSYFRVNNLDVKVKSINGGFTSFLRRKWKFKKERNKGYKHHAEDALIIANADFIFKEWKKLDKAKKVMENQMFEEKQAESMPEIETEQEYKEIFITPHQIKHIKDFKDYKYSHRVDKKPNRELINDTLYSTRKDDKGNTLIVNNLNGLYDKDNDKLKKLINKSPEKLLMYHHDPQTYQKLKLIMEQYGDEKNPLYKYYEETGNYLTKYSKKDNGPVIKKIKYYGNKLNAHLDITDDYPNSRNKVVKLSLKPYRFDVYLDNGVYKFVTVKNLDVIKKENYYEVNSKCYEEAKKLKKISNQAEFIASFYNNDLIKINGELYRVIGVNNDLLNRIEVNMIDITYREYLENMNDKRPPRIIKTIASKTQSIKKYSTDILGNLYEVKSKKHPQIIKKGSGGSSGGSSGSETPGTSESATPESSGGSSGGSSTLNIEDEYRLHETSKEPDVSLGSTWLSDFPQAWAETGGMGLAVRQAPLIIPLKATSTPVSIKQYPMSQEARLGIKPHIQRLLDQGILVPCQSPWNTPLLPVKKPGTNDYRPVQDLREVNKRVEDIHPTVPNPYNLLSGLPPSHQWYTVLDLKDAFFCLRLHPTSQPLFAFEWRDPEMGISGQLTWTRLPQGFKNSPTLFNEALHRDLADFRIQHPDLILLQYVDDLLLAATSELDCQQGTRALLQTLGNLGYRASAKKAQICQKQVKYLGYLLKEGQRWLTEARKETVMGQPTPKTPRQLREFLGKAGFCRLFIPGFAEMAAPLYPLTKPGTLFNWGPDQQKAYQEIKQALLTAPALGLPDLTKPFELFVDEKQGYAKGVLTQKLGPWRRPVAYLSKKLDPVAAGWPPCLRMVAAIAVLTKDAGKLTMGQPLVILAPHAVEALVKQPPDRWLSNARMTHYQALLLDTDRVQFGPVVALNPATLLPLPEEGLQHNCLDILAEAHGTRPDLTDQPLPDADHTWYTDGSSLLQEGQRKAGAAVTTETEVIWAKALPAGTSAQRAELIALTQALKMAEGKKLNVYTDSRYAFATAHIHGEIYRRRGWLTSEGKEIKNKDEILALLKALFLPKRLSIIHCPGHQKGHSAEARGNRMADQAARKAAITETPDTSTLLIENSSPSGGSKRTADGSEFEPKKKRKV

SEQ ID NO: 519 - protein, 1785 aa, synthetic construct
  REGION 1..1785: note = Description of Artificial Sequence: Synthetic polypeptide
MNQKFILGLDIGITSVGYGLIDYETKNIIDAGVRLFPEANVENNEGRRSKRGSRRLKRRRIHRLERVKKLLEDYNLLDQSQIPQSTNPYAIRVKGLSEALSKDELVIALLHIAKRRGIHKIDVIDSNDDVGNELSTKEQLNKNSKLLKDKFVCQIQLERMNEGQVRGEKNRFKTADIIKEIIQLLNVQKNFHQLDENFINKYIELVEMRREYFEGPGKGSPYGWEGDPKAWYETLMGHCTYFPDELRSVKYAYSADLFNALNDLNNLVIQRDGLSKLEYHEKYHIIENVFKQKKKPTLKQIANEINVNPEDIKGYRITKSGKPQFTEFKLYHDLKSVLFDQSILENEDVLDQIAEILTIYQDKDSIKSKLTELDILLNEEDKENIAQLTGYTGTHRLSLKCIRLVLEEQWYSSRNQMEIFTHLNIKPKKINLTAANKIPKAMIDEFILSPVVKRTFGQAINLINKIIEKYGVPEDIIIELARENNSKDKQKFINEMQKKNENTRKRINEIIGKYGNQNAKRLVEKIRLHDEQEGKCLYSLESIPLEDLLNNPNHYEVDHIIPRSVSFDNSYHNKVLVKQSENSKKSNLTPYQYFNSGKSKLSYNQFKQHILNLSKSQDRISKKKKEYLLEERDINKFEVQKEFINRNLVDTRYATRELTNYLKAYFSANNMNVKVKTINGSFTDYLRKVWKFKKERNHGYKHHAEDALIIANADFLFKENKKLKAVNSVLEKPEIESKQLDIQVDSEDNYSEMFIIPKQVQDIKDFRNFKYSHRVDKKPNRQLINDTLYSTRKKDNSTYIVQTIKDIYAKDNTTLKKQFDKSPEKFLMYQHDPRTFEKLEVIMKQYANEKNPLAKYHEETGEYLTKYSKKNNGPIVKSLKYIGNKLGSHLDVTHQFKSSTKKLVKLSIKPYRFDVYLTDKGYKFITISYLDVLKKDNYYYIPEQKYDKLKLGKAIDKNAKFIASFYKNDLIKLDGEIYKIIGVNSDTRNMIELDLPDIRYKEYCELNNIKGEPRIKKTIGKKVNSIEKLTTDVLGNVFTNTQYTKPQLLFKRGNSGGSSGGSSGSETPGTSESATPESSGGSSGGSSTLNIEDEYRLHETSKEPDVSLGSTWLSDFPQAWAETGGMGLAVRQAPLIIPLKATSTPVSIKQYPMSQEARLGIKPHIQRLLDQGILVPCQSPWNTPLLPVKKPGTNDYRPVQDLREVNKRVEDIHPTVPNPYNLLSGLPPSHQWYTVLDLKDAFFCLRLHPTSQPLFAFEWRDPEMGISGQLTWTRLPQGFKNSPTLFNEALHRDLADFRIQHPDLILLQYVDDLLLAATSELDCQQGTRALLQTLGNLGYRASAKKAQICQKQVKYLGYLLKEGQRWLTEARKETVMGQPTPKTPRQLREFLGKAGFCRLFIPGFAEMAAPLYPLTKPGTLFNWGPDQQKAYQEIKQALLTAPALGLPDLTKPFELFVDEKQGYAKGVLTQKLGPWRRPVAYLSKKLDPVAAGWPPCLRMVAAIAVLTKDAGKLTMGQPLVILAPHAVEALVKQPPDRWLSNARMTHYQALLLDTDRVQFGPVVALNPATLLPLPEEGLQHNCLDILAEAHGTRPDLTDQPLPDADHTWYTDGSSLLQEGQRKAGAAVTTETEVIWAKALPAGTSAQRAELIALTQALKMAEGKKLNVYTDSRYAFATAHIHGEIYRRRGWLTSEGKEIKNKDEILALLKALFLPKRLSIIHCPGHQKGHSAEARGNRMADQAARKAAITETPDTSTLLIENSSPSGGSKRTADGSEFEPKKKRKV

SEQ ID NO: 520 - protein, 1761 aa, synthetic construct
  REGION 1..1761: note = Description of Artificial Sequence: Synthetic polypeptide
MNQKFILGLDIGITSVGYGLIDYETKNIIDAGVRLFPEANVENNEGRRSKRGSRRLKRRRIHRLERVKLLLTEYDLINKEQIPTSNNPYQIRVKGLSEILSKDELAIALLHLAKRRGIHNVDVAADKEETASDSLSTKDQINKNAKFLESRYVCELQKERLENEGHVRGVENRFLTKDIVREAKKIIDTQMQYYPEIDETFKEKYISLVETRREYFEGPGQGSPFGWNGDLKKWYEMLMGHCTYFPQELRSVKYAYSADLFNALNDLNNLIIQRDNSEKLEYHEKYHIIENVFKQKKKPTLKQIAKEIGVNPEDIKGYRITKSGTPEFTSFKLFHDLKKVVKDHAILDDIDLLNQIAEILTIYQDKDSIVAELGQLEYLMSEADKQSISELTGYTGTHSLSLKCMNMIIDELWHSSMNQMEVFTYLNMRPKKYELKGYQRIPTDMIDDAILSPVVKRTFIQSINVINKVIEKYGIPEDIIIELARENNSDDRKKFINNLQKKNEATRKRINEIIGQTGNQNAKRIVEKIRLHDQQEGKCLYSLESIPLEDLLNNPNHYEVDHIIPRSVSFDNSYHNKVLVKQSENSKKSNLTPYQYFNSGKSKLSYNQFKQHILNLSKSQDRISKKKKEYLLEERDINKFEVQKEFINRNLVDTRYATRELTNYLKAYFSANNMNVKVKTINGSFTDYLRKVWKFKKERNHGYKHHAEDALIIANADFLFKENKKLKAVNSVLEKPEIETKQLDIQVDSEDNYSEMFIIPKQVQDIKDFRNFKYSHRVDKKPNRQLINDTLYSTRKKDNSTYIVQTIKDIYAKDNTTLKKQFDKSPEKFLMYQHDPRTFEKLEVIMKQYANEKNPLAKYHEETGEYLTKYSKKNNGPIVKSLKYIGNKLGSHLDVTHQFKSSTKKLVKLSIKNYRFDVYLTEKGYKFVTIAYLNVFKKDNYYYIPKDKYQELKEKKKIKDTDQFIASFYKNDLIKLNGDLYKIIGVNSDDRNIIELDYYDIKYKDYCEINNIKGEPRIKKTIGKKTESIEKFTTDVLGNLYLHSTEKAPQLIFKRGLGGSGGSGGSGGSGGSGGSGGSGGSGGSTLNIEDEYRLHETSKEPDVSLGSTWLSDFPQAWAETGGMGLAVRQAPLIIPLKATSTPVSIKQYPMSQEARLGIKPHIQRLLDQGILVPCQSPWNTPLLPVKKPGTNDYRPVQDLREVNKRVEDIHPTVPNPYNLLSGLPPSHQWYTVLDLKDAFFCLRLHPTSQPLFAFEWRDPEMGISGQLTWTRLPQGFKNSPTLFNEALHRDLADFRIQHPDLILLQYVDDLLLAATSELDCQQGTRALLQTLGNLGYRASAKKAQICQKQVKYLGYLLKEGQRWLTEARKETVMGQPTPKTPRQLREFLGKAGFCRLFIPGFAEMAAPLYPLTKPGTLFNWGPDQQKAYQEIKQALLTAPALGLPDLTKPFELFVDEKQGYAKGVLTQKLGPWRRPVAYLSKKLDPVAAGWPPCLRMVAAIAVLTKDAGKLTMGQPLVILAPHAVEALVKQPPDRWLSNARMTHYQALLLDTDRVQFGPVVALNPATLLPLPEEGLQHNCLDILAEAHGTRPDLTDQPLPDADHTWYTDGSSLLQEGQRKAGAAVTTETEVIWAKALPAGTSAQRAELIALTQALKMAEGKKLNVYTDSRYAFATAHIHGEIYRRRGWLTSEGKEIKNKDEILALLKALFLPKRLSIIHCPGHQKGHSAEARGNRMADQAARKAAITETPDTSTLLIENSSP

SEQ ID NO: 521 - protein, 1762 aa, synthetic construct
  REGION 1..1762: note = Description of Artificial Sequence: Synthetic polypeptide
MNQKFILGLDIGITSVGYGLIDYETKNIIDAGVRLFPEANVENNEGRRSKRGSRRLKRRRIHRLERVKLLLTEYDLINKEQIPTSNNPYQIRVKGLSEILSKDELAIALLHLAKRRGIHNVDVAADKEETASDSLSTKDQINKNAKFLESRYVCELQKERLENEGHVRGVENRFLTKDIVREAKKIIDTQMQYYPEIDETFKEKYISLVETRREYFEGPGQGSPFGWNGDLKKWYEMLMGHCTYFPQELRSVKYAYSADLFNALNDLNNLIIQRDNSEKLEYHEKYHIIENVFKQKKKPTLKQIAKEIGVNPEDIKGYRITKSGTPEFTSFKLFHDLKKVVKDHAILDDIDLLNQIAEILTIYQDKDSIVAELGQLEYLMSEADKQSISELTGYTGTHSLSLKCMNMIIDELWHSSMNQMEVFTYLNMRPKKYELKGYQRIPTDMIDDAILSPVVKRTFIQSINVINKVIEKYGIPEDIIIELARENNSDDRKKFINNLQKKNEATRKRINEIIGQTGNQNAKRIVEKIRLHDQQEGKCLYSLESIPLEDLLNNPNHYEVDHIIPRSVSFDNSYHNKVLVKQSENSKKSNLTPYQYFNSGKSKLSYNQFKQHILNLSKSQDRISKKKKEYLLEERDINKFEVQKEFINRNLVDTRYATRELTSYLKAYFSANNMDVKVKTINGSFTNHLRKVWRFDKYRNHGYKHHAEDALIIANADFLFKENKKLQNTNKILEKPTIENNTKKVTVEKEEDYNNVFETPKLVEDIKQYRDYKFSHRVDKKPNRQLINDTLYSTRMKDEHDYIVQTITDIYGKDNTNLKKQFNKNPEKFLMYQNDPKTFEKLSIIMKQYSDEKNPLAKYYEETGEYLTKYSKKNNGPIVKKIKLLGNKVGNHLDVTNKYENSTKKLVKLSIKNYRFDVYLTEKGYKFVTIAYLNVFKKDNYYYIPKDKYQELKEKKKIKDTDQFIASFYKNDLIKLNGDLYKIIGVNSDDRNIIELDYYDIKYKDYCEINNIKGEPRIKKTIGKKTESIEKFTTDVLGNLYLHSTEKAPQLIFKRGLLGGSGGSGGSGGSGGSGGSGGSGGSGGSTLNIEDEYRLHETSKEPDVSLGSTWLSDFPQAWAETGGMGLAVRQAPLIIPLKATSTPVSIKQYPMSQEARLGIKPHIQRLLDQGILVPCQSPWNTPLLPVKKPGTNDYRPVQDLREVNKRVEDIHPTVPNPYNLLSGLPPSHQWYTVLDLKDAFFCLRLHPTSQPLFAFEWRDPEMGISGQLTWTRLPQGFKNSPTLFNEALHRDLADFRIQHPDLILLQYVDDLLLAATSELDCQQGTRALLQTLGNLGYRASAKKAQICQKQVKYLGYLLKEGQRWLTEARKETVMGQPTPKTPRQLREFLGKAGFCRLFIPGFAEMAAPLYPLTKPGTLFNWGPDQQKAYQEIKQALLTAPALGLPDLTKPFELFVDEKQGYAKGVLTQKLGPWRRPVAYLSKKLDPVAAGWPPCLRMVAAIAVLTKDAGKLTMGQPLVILAPHAVEALVKQPPDRWLSNARMTHYQALLLDTDRVQFGPVVALNPATLLPLPEEGLQHNCLDILAEAHGTRPDLTDQPLPDADHTWYTDGSSLLQEGQRKAGAAVTTETEVIWAKALPAGTSAQRAELIALTQALKMAEGKKLNVYTDSRYAFATAHIHGEIYRRRGWLTSEGKEIKNKDEILALLKALFLPKRLSIIHCPGHQKGHSAEARGNRMADQAARKAAITETPDTSTLLIENSSP

SEQ ID NO: 522 - protein, 7 aa, synthetic construct
  REGION 1..7: note = Description of Artificial Sequence: Synthetic peptide
PKKKRKV

SEQ ID NO: 523 - protein, 19 aa, synthetic construct
  REGION 1..19: note = Description of Artificial Sequence: Synthetic peptide
MKRTADGSEFESPKKKRKV

SEQ ID NO: 524 - protein, 30 aa, synthetic construct
  REGION 1..30: note = Description of Artificial Sequence: Synthetic polypeptide
MDSLLMNRRKFLYQFKNVRWAKGRRETYLC

SEQ ID NO: 525 - protein, 20 aa, synthetic construct
  REGION 1..20: note = Description of Artificial Sequence: Synthetic peptide
AVKRPAATKKAGQAKKKKLD

SEQ ID NO: 526 - protein, 25 aa, synthetic construct
  REGION 1..25: note = Description of Artificial Sequence: Synthetic peptide
MSRRRKANPTKLSENAKKLAKEVEN

SEQ ID NO: 527 - protein, 9 aa, synthetic construct
  REGION 1..9: note = Description of Artificial Sequence: Synthetic peptide
PAAKRVKLD

SEQ ID NO: 528 - protein, 9 aa, synthetic construct
  REGION 1..9: note = Description of Artificial Sequence: Synthetic peptide
KLKIKRPVK

SEQ ID NO: 529 - protein, 8 aa, synthetic construct
  REGION 1..8: note = Description of Artificial Sequence: Synthetic peptide
VSRKRPRP

SEQ ID NO: 530 - protein, 10 aa, synthetic construct
  REGION 1..10: note = Description of Artificial Sequence: Synthetic peptide
EGAPPAKRAR

SEQ ID NO: 531 - protein, 12 aa, synthetic construct
  REGION 1..12: note = Description of Artificial Sequence: Synthetic peptide
PPQPKKKPLDGE

SEQ ID NO: 532 - protein, 21 aa, synthetic construct
  REGION 1..21: note = Description of Artificial Sequence: Synthetic peptide
SGGSKRTADGSEFEPKKKRKV

SEQ ID NO: 533 - protein, 268 aa, Methylocella silvestris
IETRREVEAFEANSQSNLKRIADQLLHRKFIFPAAKGVPIQKAKGKRGDIRPLVVAKVEARIVQRAIHDVLIEVPSIRRYVRTPYSFGGVRKEKDDSVSAVPAAIDAAMAAIGDGFSYYIRSDITAFFTKIPKSAVAALVSDAVGHQSEFMDLFRRAIHVELENMARLARTVNAFPIYDIGVAQGNSLSPLLGNILLYDFDQQMNGNPDAVCLRYIDDFIIFAKTQQLAENMFQKAIHILASHGMSVAKHKTVKGLVRDKFEFLGIEF

SEQ ID NO: 534 - protein, 263 aa, Nitrosospira multiformis
PTIRTEIEQFSLSLEKNLRRIADQLREKRYVFSQSYGVAVKKKNNPSKKRPIVISPIPNRIVQRALLDVVQEIPSVRAKLDSGFNFGGIAEIGVPQAILKAYKTALEKPYFIRTDICAFFDNIPRSQALEIITSASKDDDFNTLLTQATTTELSNLITLGRDKELFPLEGKGVAQGSCLSPVLCNLLLDDFDKKMNARGIVCIRYIDDFILFAPSESKAFKAFASASAFLEKLNLSVYDPRHSPDKAEHGVSNKGFEFLGCSV

SEQ ID NO: 535 - protein, 267 aa, Pseudomonas syringae
SSDEIKRDAEEFESRLPDSLVEIQRSLSKQTFTFLQQTGVAQKKPGGKARPLVLAPIPNRVVQRALLDVLQRRVRFVRKVLDTPTSYGGIPTKRVAMAISDARDAMRNGARFHIRSDIPAFFTKINKDRVQDLLRSHINCDATLKLLDLAITTDLANIDDLRRQGLNEIFPIGIEGVAQGSPLSPLLANIYLADFDVAMNADGITCLRYIDDFLLLGESLSNVDRAFNRALKTLDKIGLSAYDPRVDKVKASRGSTDKGFDFLGCNV

SEQ ID NO: 536 - protein, 245 aa, Clostridium saccharogumia
GIDGVMLSQLKEYLILNWQDIENQLILGTYEPNIVQVYELLSKKGKVREIYKFTIIDNFIQKAVSLILQDKLDCLLSDNNYSFRKGKGTIDVIRKGLELIEEGYEYIVEIDIKKYFENIDHVLLSKMLFDIIDDKVLISLIMKYQNCLIQKDGKIKRKNKGLITGSSISPVISNLYLMDLDRQYLEYNYIRYCDNIYIFINNKDDGLTLINDISKCLKDKYKLEINQNKTSITHYLSKRMLGYYF

SEQ ID NO: 537 - protein, 247 aa, Lachnoanaerobaculum saburreum
GIDGLYLSELRDDWNINGERYLSLLRKGKYKPGIVQIYEIVNYTGKRRSISSFNSIDRLVLRCLATSLEKYYDSIFSSSSFAFRPGLGVDKAVATFANNLNTGLTRVAIIDIKHYFDSIPIDRLEMILKRIIDDNVLLSLFHNLLYCRISEENVIKTKSKGILQGSPISPFLGNLYLSLLDTQLESMHVSFCRYCDDIAMFFASFEEAKETYTKVYDILKNDLEMDINPQKSGIYEGIKQNYLGYSF

SEQ ID NO: 538 - protein, 247 aa, Lachnoanaerobaculum saburreum
EIDGLHLSELRDYWDINGERYLSMLRAGKYKPGIVQIYEIINYTGKRRSISSFNSVDRLILRCLATSLEKYYNSIFSACSFAFRPGLGVDKAVAAFVSNLNKGLDKVVVIDIKHYFDSIPIDRLEMILKRIIDDKILLSLFHKFLYCRISEENIIKTKNKGILQGSPISPFLGNLYLSLLDTQLESMQIQFCRYCDDITMFFSSFDEAKEAYTKVSNILKNDLEMDIHTQKSGIYEGIKQNYLGYNF

SEQ ID NO: 539 - protein, 249 aa, unidentified
  REGION 1..249: note = Description of Unknown: Eubacteriaceae bacterium CHKCI004 sequence
GIDGIFVKDFEEYWILNGQKILKQVMNGVYMVSPVQLREIIMPTGKHRIIAHYTCTDRLITRILAESLQKEVDDSLSEYSYAYRKQRGVIKAVEQAAAYMQAGKIWVLELDIENYFNNINLTLMEEKIREIILDKNLFSLMEQYLRCEVMEEEYTKTYIKDKGLVQGCSLSPVLSNIYLNKLDQQMEKEGLSFCRFGDNINIYFYNKLEAAEWYAKIKAIIENEFDLHLNIRKSGIYLGVNRIFLGYSF

SEQ ID NO: 540 - protein, 247 aa, Roseburia inulinivorans
GLDGVKLSELRAYWETNGKKIKESIFNGTYKVGAVEQRQIVNRKGKKRTISLMNSIDRFIFRALYQKMASEWEKQFSQYSYAYQNNKGVLTAVEQAAKYMEEGKDWSVELDIQNFFDNINHSIIISKLKAGIEDVRVLDLLIAYLTCTLLDDHAFHQMEQGVLQGGPLSPLLANVYMNELDHYMEKQGYSFGRFGDDINIYCSTYEEATVAFSDVTARMEKIEQLPLNHGKTGIFKGINRKYLGYRF

SEQ ID NO: 541 - protein, 242 aa, unidentified
  REGION 1..242: note = Description of Unknown: Candidatus Magnetoovum chiemensis sequence
GPDTITTDDLKKAGDQFLDKLKNNIVNGNYKQGKTKQYRIPKNDDTFRYIYVLNTTDRLVHKTIADYISPIVDNIISNSAYAYRRGLNTKGAANALNNALKEGYTSGIKADISEFFDSINISALSMMIDSLFPFEPLADFINGILENNTRDGIKGILQGSPLSPLLSNLYLTRFDSDMESKGFFKLIRYADDFVLLLKTASSYEETIKHVEDSLSTLGLKLKPEKTTEITQGKAINFLGYVI

SEQ ID NO: 542 - protein, 252 aa, Desulfobacca acetoxidans
GLDGVSVQSFGDQAASHLEDLRQALQAGNYTPEPHQRIKVPKLDGSGELRPLSLPTIKDKIVQEAVRRIIEPLFEPEFLPCSYAYRPGQGPRRAIGRAIHYLEHDKCRWAVHADFDKFFDTLDHEVLLRRLQEKIKELPVLKLVRMWLRTGSIGAKGTYDDADLGVGQGGILSPLLSNIYVHPLDVYLTDKGHRYIRYADNVLILADSQPRGTEGLNDLIYFSQEMLKLRLNPEAKPLRHVADGFTFLGIHF

SEQ ID NO: 543 - protein, 252 aa, unidentified
  REGION 1..252: note = Description of Unknown: Candidatus Brocadia fulgida sequence
GLDGVEIDDQHTDADKMVSALIKELRTGAYVPVPYARGAIPKFDEQNQWRKISLPSVRDKVVQQAFVEALGPVFNKTFLDCSYAYREGKGPVKAIKRVEHILHTHHIRWVTTMDIDNFFDTMDHDIFIGEFTKKVAEPEILQLVRLWLKAGCISARGDWIEPYDGIAQGAVVSPLFSNIYLHPLDCFAIGNNCLYVRYSDNLIVLSETKETLYLWYEQLKSFLEDRLRLRLNEDPYPFKDKERGFVFLGIFF

SEQ ID NO: 544 - protein, 253 aa, unidentified
  REGION 1..253: note = Description of Unknown: Candidatus Scalindua brodae sequence
GLDNVTVESFGNRLDQHISKLQKEIMEHRYVPKPLKSIHVPKYNKENEWRGLALPSVSDKVVQAALLQVVEPLGEKLFMDSSYAYRKGKGHYKAIRRVEHCLGNRKKSWVVHRDIDNFFDTLNYDRLIDQFSALVDGEPVMTELVALWCRTGLVEAGGRWRGVQSGIRQGNIISPLLSNLYLHPLDEFAARLRIDWVRYCDDYLILCDSRKDAISADRLIKEYLKEPLCLKLNNSGLSPCHIDEGFTFLGVSF

SEQ ID NO: 545 - protein, 253 aa, unidentified
  REGION 1..253: note = Description of Unknown: Candidatus Jettenia sp. AMX1 sequence
GLDGITVEEFGHRLDQHITKLQKDIRERRYIPQPAAVTYIPKFNEENEWRELGLPSVADKVVQAAMLEVVEPLAEKMFLDCSYAYRPGTGHYKAIRRVENSLNNRKKTWVVQRDIDNFFDTVDHNRLMEQFSALVQGEPTMVELVALWCRMGLVEKNGRWRNVQAGIRQGGVISPLLANLYLHPLDVFATKLGVDWIRYADDYVILGESQEEVVSSDVQIVEFLKDSLGLMLNRDESSPKHIDEGFTFLGVRF

SEQ ID NO: 546 - protein, 249 aa, unidentified
  REGION 1..249: note = Description of Unknown: Candidatus Magnetomorum sp. HK-1 sequence
GVDGVTISSFNANLEVNLSELSNQILTNQYTPEPLQAAHIPKPGKSEKRQLGLPSLKDKIVQSSLASILSDFYEIHFSNCSYAYRPGKGSVKAIGRVRDFLNRKNYWIASVDIDNFFDSVDHEICTSILKEQISDQSIIRLISLYFSSGMIKFDQWQDTEIGIPQGGAISPVISNIYLNKLDHFLHTLNAFFVRYADDIILFSNTQQSLSETYQKTNEFLNKKLNLKLNALDNPIINVSKGFSFLGIYF

SEQ ID NO: 547 - protein, 249 aa, unidentified
  REGION 1..249: note = Description of Unknown: Candidatus Magnetoglobus multicellularis str. Araruama sequence
GIDGVSISEFETARDKNLQELSQQILYSQYTPEPLQAVQIPKPGKTEKRQLGLPSLKDKIVQSSLASLLSDFYDPLFSNCSYAYRPQKGSVRAIGRVKDFLNRKNHWAAPVDIDNFFDTVNHETCISILQDKISDIDIIRLIRLYFSSGKIQFDKWQDTIIGIPQGGALSPVLSNVYLNELDQYLHAIQANFVRYADDIILFANTRQFLLDFYEKTRHFLESKLQLKLNQTSHPVMSMEKGFAFLGIYF

SEQ ID NO: 548 - protein, 243 aa, Hippea sp.
RVSLKREIHLPEKEIENLFRALQNSTYIPEPPQKIELKKHDKIRPITIASKKDKIVQALLHEYLTELFDSSFSDKSYAYRPNKGPLKAVNRTFDYIKRGEKYVLKTDIKDFFETIDHSLLICMLKEKIKDDSLIDLIMMYIKIGTVKNLEYEDHNLGVHQGNIISPILSNIYLDRMDKFLERHGFNFVRFADDFVVFAKTHDRIELIHRNLKRFLKVYKLGLNEEKTYITTTDSGFAFLGAYF

SEQ ID NO: 549 - protein, 248 aa, Aliarcobacter butzleri
GLDNISYIEFKQNFTSQIKELIETILKGTYSPEPLKKIEIQKEDSLEKRPIALSSIKDKLVQRVLYKALNDYFDETFSNKSYAYRKDKSTLNAINRVGQFIQEQNHFILKTDIDNFFESINHDKLLTILDKHIQDKSIIRLISLFLQIGSFKEFDYFEHEDGVHQGDILSPLLSNIYLDLMDKWLEKYDIFFVRYADDFVVFSKKEDELKTIKENLEKFLESLDLKFGIDKTYFTTIQKGFSFLGVYF

SEQ ID NO: 550 - protein, 244 aa, Campylobacter fetus
GIDNLSELNEHFIHKLKQSCLNQTYVPEPVLQKLIPKSDGENYRKLAISSLKDKLIQKVLANELAWYFDKHFSDKSYAYRPGKSYKNAIFRLRDFLRVKPYFVIKSDIKDCFESINHSKLVALLAKYIKDKRVLNLVEIWIKNGIFNRQTYIKHSKFGIHQGDVLSPLLANIYLNQMDKFLETNNEIFIRYADDFVILADDEKFVQAKINSLKTFLSTIDLSLKDTKTAIYSPTQSFEFLGVSF

SEQ ID NO: 551 - protein, 245 aa, Campylobacter concisus
GLDELSMDELCTEAFFAELKDEILNLSYSPQPLKRAFIPKENKDEFRKLAIPSLKDKFTQNILIGELSSYFDKGFSNRSYAYRSGKSYSNAIFRARDFCLTHDFVLKTDIKDFFENINHEKLLEILRSNIKDTRIIRLIELWIKNGIFEHFDYTSHTKGVHQGDVLSPLLSNIYLDQMDKFLEHSSIEFVRYADDFVLFFGSREACEQALAGLKDFLVTINLSLNEAKTSLHDKDSEFTFLGVNF

SEQ ID NO: 552 - protein, 245 aa, Campylobacter gracilis
GFDGLSADDICSGEFYAELKSEIFSLSYSPQPLKRAFIPKEAKDELRKLAVPSLKDKFVQNILTRELSGYFDKSFSNRSYAYRNGKSYANAIYRARDFFQIFSFAVKTDIKDFFENIDHEKLLEILRANIRDARIIRLIELWIKNGIFERFDYRAHTKGVHQGDVLSPLLSNIYLNQMDKFLENSGVEFVRYADDFVMFFASYEAAEMRLARLKDFLKTISLSLNEAKTSIHGKDSEFVFLGVSF

SEQ ID NO: 553 - protein, 245 aa, Fretibacterium fastidiosum
GQTIDAFRRDRDRNVTRISDSLKNGTYAPSPLRGVKISKNGGGFRRLGVPTVKDRIVFQGANRLLADVWDPLFAPLSFAYRSGRSIADAIDAVIERIRKGRVWFVKGDIKGCFDELSWDVLSACLHDWLPDESLRRLVNQAIRVPVVEGGQIRPRLRGIPQGSPLSPLLANLYLHSFDLQMLQQGFPVIRYADDWLLLVGSEPEAQAALQTAQGILSVLNIAINEEKSGIGNLRCESVAFLGHRI

SEQ ID NO: 554 - protein, 221 aa, Shigella boydii
LCQVFGVHRSSYRYWKNRPEKPDGRRAVLRSQVLELHGISHGSAGARSIATMATRRGYQMGRWLAGRLMKELGLVSCQQPTHRYKRGGHEHVAMPKWVILYCRRWMEAPMQSCENGELITRTRGTPQGGVISPLLANLFLHYAFDLWMEREYRGVPFERYADDIVVHCSRMSDATRLKNRLSERFSEVGLVLNAGKTNIAYIDTFKRRNVATSFTFLGYDF

SEQ ID NO: 555 - protein, 248 aa, Bacteroides salyersiae
GVDGFTVAHFEKKLTDNLTELHHELVTGTWNPEPYLRVEIAKNETEKRKLGLLCIKDKIVQQAIKTAIEPQMDKTFLNISYGYRPGKGAERAIRRTIQELKKLKNGYIAKLDIDNYFDNINQERLFTRLGNWLKDDETLRLIKLCVQTGIVNPQLKWERTTKGIPQGAILSPLLANFYLHPFDQFAISKAPMYIRYADDFLIASPSEKQTKEAVELIKEELADTFYLQLNKPLVCNFHDGVEFLGIIV

SEQ ID NO: 556 - protein, 248 aa, Bacteroides fragilis
GIDGFTLSHFEKRLNDNLIELQHELISQTWNPEPYLRIEITKNETEKRKLGLLCIKDKIVQQAIKTAFEPQLEKTFLNLSYGYRPNKGPERAIKRVVHDLKKLKSGYVAKLDIDNYFDTINHERLFTRLANWLKDDETLRLIRLCIQTGIVTPQLQWQEINKGVPQGAILSPLLANFYLHPFDQFAANKVPMYIRYADDFLIATSTEKQIKEAVELVKEELESQFYLQLNTPIIHNFHDGIEFLGITI

SEQ ID NO: 557 - protein, 256 aa, Nostoc sp.
GVDGKKALEPSQRLALYEVLVKNWKQWKHQPLKRVYIPKADGTRRGLGIPTISDRAYQCLIKYALEPAAEAMFNARSYGFRPGRSCHDVQKLLFSNLNGGQANGLSKRILELDIERCFDKIDHKFLMQSVQLPKAAKQGIFWAIKAGVRGEFPSSESGTPQGGVISPLLANIVLHGLENVGHELRYKVRSGGRQIDTIKGFRYADDVVFLLKPEDNPEALRQNIDTFLEARGLKVKEAKTKIVHSTDSFDFLGWNF

SEQ ID NO: 558 - protein, 236 aa, Anabaena sp.
GVDGKASLTYKERVELDKLLMEQVNTWTHSKLREIPIPKKDGTKRILKVPTIKDRAWQCIIKYTIEPAHEAIFHERSYGFRPGRSTHDAQKYLFDNLRSQSHGKDKIILEMDIEKCFDRISHNHLMSQIIAPQSVKLGVWKCLKAGVNPEFPEQGTPQGGVCSPLLANIALHGIEAIHKSVRYADDMVFIFKKGDDQAKVFDEITEFLRIRGLNIKTAKTRFVPATTGFNFLGWKF

SEQ ID NO: 559 - protein, 224 aa, Nostoc sp.
GCGESRTPRFNREVRRIIPPIDSNQCLAKYALEPAHEATFHEHSYGFRPGRSTHDAQSQIANYLASSKGGINKRILELDIEKCFDRINHSTIMSNLIAPQGLKQGIFRALKAGINPEFPEQGTPQGGVVSPLLANIALNGIEDLHQYHDCNYKKITPSTPERNIKKACVRYADDMVFFLRPEDDAEEILEKISQFLAQRGLKISEKKTKLTASTDGFDFLGWNF

SEQ ID NO: 560 - protein, 235 aa, Crocosphaera watsonii
GIDGIKSLNFKQRFALAERLLKAHDWKHSKLREIPIPKKDGTTRMLKVPTMADRAWQCLVKYALEPAHEALFHARSYGFRPGRSTHDAQKILFLNLKSDSNGLNKRILELDIEKCFDRINHTSIMERVIAPQTIKTGIWRCLKAGVNPEFPEQGTPQGGVVSPLLANVALDGIEDIHYSIRYADDMVVILKPKDDADKILKDIQEFLAARGLKVSEKKTKLVRATEGFDFLGWHF

SEQ ID NO: 561 - protein, 258 aa, Rivularia sp.
GIDGKKSLTFEERFALEELLKAKSSKWKHQKLRAIPIPKKDGTTTRLLKIPTLADRCWQCLAKYALEPAHEATFHKHSYGFRTGRSAHDAQKQVFQNLKSSSNGINKRILELDIEKCFDRINHSSIISNLIAPNRLKLGIFRCLKVGINPDFPEQGTCQGGVVSPLLANIALNGIEELHKYHTNKGRKIKATTPEKDINTACVRYADDMVFFLRPEDDEKEILDNISQFLAKRGLKVSEKKTKLTASTFGFDFLGWHF

SEQ ID NO: 562 - protein, 256 aa, Nostoc sp.
GIDGVKSLDFNGRFELEITLKQSSGNWHHQELREIPIPKKDGTTRMLKIPTIADRCWQCLAKYALEPAHEATFHARSYGFRTGRAAHDAQQFLFSNLSSKAKRISKRVIELDIEKCFDRINHSTIMENLIAPKGIKLGIYRCLKAGINPEFPEQGTPQGGVVSPLLANIALNGIESIHRYHKDNQRITNKTPESDIRYPSVRYADDMVIVLRPQDDANEILAKIEDFLNARGMKVSAKKTKITATTDGFDFLGWHI

SEQ ID NO: 563 - protein, 256 aa, Calothrix sp.
GIDGKKSLTFRERFELSELLKASCNNWKHQGLREIPIPKKDGTTRMLKIPTMADRAWQCLAKYALEPAHEATFHARSYGFRSGRSAHDAQTVLLTHLRSNNNGINKRVIELDIEKCFDRISHTSIMENLIAPKGVKLGIFRCLKAGINPEFPEQGTPQGGVVSPLLANIALNGIESIHRYHRNGSKITNKTAGKDITEPSIRYADDMVIIIRPQDDAQKILADIDSFLAARGMKVSEKKTKITAATDGFDFLGWHF

SEQ ID NO: 564 - protein, 256 aa, Anabaena cylindrica
GIDGKTALTFEQRFQLSEKLRTEANNWKHQGLREIPIPKKDGKTRILKVPTIADRAYQCLVKYALEPAHEATFHARSYGFRTGRSAQDAQKYLYTNLNSSVNGIEKRVIELDIEKCFDRINHTAIMDRLIAPYSIRLGIFRCLKAGVNPEFPEQGTPQGGVVSPLLANIALNGIESIHRYHIQGLRITNKTKGYKIVEPSVRYADDMIIILRPEDDAKEILDKISRFLAERGMKVSEKKTKLTATTDGFDFLGWHF

SEQ ID NO: 565 - protein, 236 aa, Crinalium epipsammum
GIDGKASLNHEERFALSEELRTRSSKWKHQKLREIPIPKKDGTTRLLKVPTIGDRAWQCLVKLALEPAHEATFHAKSYGFRTGRAAHDAQKYLFDHLRSTSHGIEKRVIELDIEKCFDRIAHKSIMERLIAPSGIKLGIYRCLKAGVNPEFPEQGTPQGGVVSPLLANIALNGIEDIHQSVRYADDMVFILKPKDDAVAILEQISQFLAERGMKISEKKTKLTATTDGFDFLGWHF

SEQ ID NO: 566 - protein, 236 aa, Oscillatoria nigro-viridis
GIDGRASLTFEERLALSEELRAKSNNWKHQKLRSIPIPKKDGSTRLLKIPTIADRAWQCLAKYALEPAHEATFHARSYGFRTGRSAHDAQKFLFLNLSSKAHGISKRVIELDIEKCFDRISHTSIMERLIAPKGIKTGIFRCLKSGVNPGFPEQGTPQGGVVSPLLANIALNGIEEIHRSVRYADDMVIILKPKDDAKAILDKVSEFLAARGMKVSEKKTKLTATTDGFDFLGWHF

SEQ ID NO: 567 - protein, 259 aa, Bacillus megaterium
GVDGYTASKPNERIKLYQQLVKCNVFRHRPKPAKRTFIPKKNGKLRPLGIPTMRDRVYQNVVKNALEPQWEVKFEPTSYGFRPKRSTHDAISNLFNKLNTNSKKKWVFEGDFLGCFDHLNHNWIMEQTSMFPGNTLIKRWLNMGYIEQDMLHTTTEGTPQGGIVSPLLANIALCGMEEEIGIVYKKTYKSNGGYKIDPKKIGRVLYADDFVIVTETKEQAESMYQNLTPYLRKRGITLSKEKTRVTHIEDGFDFLGFSL

SEQ ID NO: 568 - protein, 257 aa, Bacillus cereus
GIDGYISNTPQERVELFNKLSRYSVRNIKVKPARRTYIPKKNGKLRPLGIPVIVDRVYQNAFKNALEPQWEAKFEMTSYGFRPKRSTHDAMSDLFTKLSKGSAKGWIFEGDFEGCFDNLNHDYIMGCINNFPNKSIIRDWLESGYVDNDVFNETTKGTPQGGIISPLLANVALHGMEKEIGVRYIHTTRQGDTLYSNSVGVVRYADDFVIVCPTEEEAYGMYDKLEPYLNKRGLNLAKDKTRVVHISKGFDFLGFNF

SEQ ID NO: 569 - protein, 257 aa, Bacillus anthracis
GIDGITTNTPEDRVKLFHLLKGYSVRNIKAFPVKRAYIPKKNGKKRPLGIPVIKDRIFQNMVKNALEPQWECRFESMSYGFRPKRSAHDAMANLFLKLSRGTNRAWIFEGDFQGCFDNLNHEHILSCIEGFPYSNAINQWLNAGCIDNKTFYKTETGTPQGGIISPLLANIALHGMEKELGVRYHFPKRDGAMLYPDSIGIVRYADDFVIVCNSKEEAESMYAKLQPYLDKRGLKLAEEKTRVVHITDGFDFLGFNF

SEQ ID NO: 570 - protein, 267 aa, Crocosphaera watsonii
GVDGKKSLRPNQRLKLVNELRLKGYKAKALRRVWIPKPGRDEKRGLGIPTMKDRAMQALVKSALEPYWEAQFEGTSYGFRPGRSAQDAISRIFLAIKTNAKYVLDADIAKCFDKINHDYLLSKVDCPHNIKRIIKQWLECGVMDKGIFEETDSGTPQGGVISPLLANIALHGMIIDIENHFPRTKRREDGSLKQGYKPKIIRYADDFVILHTDYDVILQCKNLVAQWLEKVGLELKPEKTSIRHTLKSIVHNGKTIEPGFDFLGFNI

SEQ ID NO: 571 - protein, 259 aa, Trichodesmium erythraeum
GIDGIKNLPSMQRFNLVDLLKRHRFKASPTRRVWIPKPGKDEKRPLGISTMYDRALQALVKLGRSPEWEAHFEPNSYGLRPGRSTHDAIAAIYVSINKKPKYVLDADISKCFDRINHDALLRKIGRTPYRRLIKQWLKSGVFDNKQFSDTLEGTPQGGVISTLLVNIALHGMEKCLEKYAETLPGKKRDNKQALSLIRYADDFVILHEDIKVVMQAKTVIQEWLNQVGLELKPEKTKIAHTLEEYEGNKPEFDFLGFNI

SEQ ID NO: 572 - protein, 262 aa, Calothrix sp.
GIDGVKSLKPSARLTLVMNMKLNHKVKATRRVWIPKPGNVEKRPLGIPTMQDRATQSLVKLALEPEWEAKFEPNSYGFRPGRNAHDAREAIFNSIRYSNKWVLDADISKCFDKINHEKLLTKINTFPTMRRQIKAWLKAGVLDNGHFSETTEGTPQGGVISPLLANIALHGLEKLVKEFAASQRGGKVKNQNSISLIRYADDFVILAPNKTQIIVLKEIVKTWLAEMGLELNPNKTRIVSTFKSSEIFASQEVGFNFLGFNV

SEQ ID NO: 573 - protein, 261 aa, Nostoc sp.
GVDGRKNLSPKARLILVQSMKLGDKASPTRRVWIPKPGSSGEKRPLSIPTLYDRALQSLVKLALEPEWEARFEPNSFGFRPGRNAHDAMKAIFNTIKFKPKYVLDADIAKCFDKIDHNVLLSKLNTFPTISRQIRAWLKAGVIDFSEYALHTTSMGVPQGGTISPLLANIALHGMENRIKQVALTLPGCKSENRQAISLIRFADDFVILHKDLAVIQRCQQIISEWLSELGLELKPSKTRISHTLNMYEGKVGFDFLGFTV

SEQ ID NO: 574 - protein, 247 aa, Gloeobacter violaceus
GVDGVKSLTPKARLALTKNLRISEKAKPMRRVWIAKPGTQEKRPLGIPTMTDRARQALLTLALEPEWEARFEPNSYGFRPGRSCHDALQAIYNAIRQQSKFVLDADIAKCFDRIDQQALLKKMNTSSAIRRQIRAWLKAGVMEGSELFPTPTGTPQGGVISPLLANIALHGMEERVKQVSKMAQLIRYADDFVCIHTDQQIVQSCQTVLEEWLAGMGLELKPSKTRIAHTLLLEEGQPGFDFLGFTV

SEQ ID NO: 575 - protein, 157 aa, Thioalkalivibrio nitratireducens
MQRCFLSLAKRSSAEWILEGDIRACFDAFDHDWLIEHTPTDQGRLRAWLKSGFMEQRRIFPTERGTAQGGIISPTVANMVLDGLEGRIRARFKRRGKVNLIRFADDFVITGESRAILENDVTPLVTEFLHERGLVLAPEKTRIVHIDDGFDFLGFRF

SEQ ID NO: 576 - protein, 196 aa, Xenorhabdus bovienii
MIDRTQQALHLLALDPISETIADPNSYGFRPNRSTADAIAQCFKCLCQKRSARWVLEEDLKACFDKIGYQWLIENIQIDKRMLKQWLGSDFIDKGLFYRTAEGTPQGGIISPTLMLLTLAGLEKRVKEVARKTDDRINSIEYADNFVMTGASEDVLLNEVKPQLIDFLRERGLTLSEEKTHITHINDGFDFLGFNL

SEQ ID NO: 577 - protein, 245 aa, Shewanella baltica
GIDGIIWNSDARCMTAVNQLSRKGYHAKPLRRIYIPKKNGKLRPLGIPCMIDRAQQALHLLALEPISETVADLNSYGFRPNRSAADAIAQCFKCLCMKRSSQWVLEGDIKACFDKIGHQWLIDNIQLDKRMLKQWLGCGYVDKGLFYKTAEGTPQGGIIPPTLMLLTLAGLEQLVKSIACKTGNSVNFIGYADDFIITGSSKEVLVNEIKPQLIGFLQERGLTLSDDKTHITHIDDGFDFLGFNI

SEQ ID NO: 578 - protein, 245 aa, Shewanella baltica
GIDGIIWNTDARRMKAVNQLSRKAYIAKPLKRIYIPKKNGKLRPLGIPCMIDRAQQALHLLALEPVSETLADPNSYGFRPNRSTADAVDQCFKCLAQKKSAQWVLEGDIKACFDKIGHQWLLDNITVDKRMLEQWLKSGFMDKGLFYRTDEGTPQGGVISPSLMLMTLAGLEQHIKSTALKKGTRANFIGYADDFVVTCASKEVLENDIKPLITDFLAERGLTLSEEKTHITHINDGFDFLGFNH

SEQ ID NO: 579 - protein, 245 aa, Shewanella sp.
GIDGVIWNTDARRIAAVKQLKRKAYQAKPLKRIYIPKKNGKLRPLGIPCMIDRAQQALHLLALEPISETVADPNSYGFRPHRSTADAIAQCFLCLSQRYSSEWVLEGDIKACFDKIGHQWLIDNIALDKKMLRQWLECGFMDKGLFYRTDEGTPQGGIISPTLMLLTLSGLEQLLKATARRKGCNVNFIGYADDFVVTGSSKEVLVNEIKPLIARFLAERGLTLSEEKTHVTHINDGFDFLGFNL

SEQ ID NO: 580 - protein, 248 aa, Methanosarcina barkeri
GIDGEKWLSSASKMKAVLSLTGKRYKAKPLKRVFINKPGKTKKRPLGIPTMYDRAIQSLYSLALEPVAEIKSDLRSFGFRKHRSTKDACQQIFLCLSKKTSAQWILEGDIRGCFDNINHQWLLTNIPIDKAILTQFLKAGFIYKRHLNPTKAGTPQGGIISPILANMTLDGIEKMLLVKYPKKGKNSKKVNFIRYADDFIVTANSKETAGEIKDEVVAFLKERGLELSDDKTFITNINEGFDFLGWNF

SEQ ID NO: 581 - protein, 256 aa, Clostridium pasteurianum
GVDKELWSTTASKMQAVLSLTDKNYKAKPLRRVYIEKKGKKAKRPLGIPCMYDRAMQALYALALDPVSEVTADTKSFGFRKNRCCQDACEYIFTALSRENCAKWILEGDIKACFDYISHEWLIENIPMDKSVLKQFLKAGFVFENELFPTDDGTPQGGVISPILANMALDGMQKALSDRFHTNKLGRVDNRFQIANKVYLVRYADDFIVTAATKEIAEEAKELIREFLQTRGLELSEEKTKITHINDGFDMLGWTF

SEQ ID NO: 582 - protein, 256 aa, Streptococcus equi
GIDGELWTTPAQKMEALLSLTDKGYKASPLRRVYIDKKGKKKKRPLGIPTMYDRAMQALYALALEPIAETTADTKSFGFRKGRSCQDACEYIFTALSRKASPQWILKGDIKGCFDNISHDWLLENIPMDKSILKQFLKAGFVFKGELFPTEDGTPQGGIISSILANMALDGLQQVLSDRFHTNRLGRIDFRFKNSHKVNLVRYADDFIVTAATQEIALEAKELIREFLIGRGLELSEEKTLVTHINDGFDLLGWNF

SEQ ID NO: 583 - protein, 253 aa, Fibrella aestuarina
GVDGQLWTNPPRKRQAIDELRSRGYRPQPLKRIYIPKRNGKQRPLSIPTMKDRAMQALHLMALQPVSETTADPCSFGFRPARQVADAVERCFGLLSRQDSPQWVLEADIEACFDRIDHDWLLQHIPMEKTILGQWLKAGYIEKGNWWPTTEGTPQGGIISPVLANMALDGLAKELAAHFAKSYKRPDRGFNPKVRLVRYADDFIITGISRQQLEEQVKPVVCNFLSKRGLRLSESKTRQTAITEGFDFLGFTF

SEQ ID NO: 584 - protein, 250 aa, Pseudomonas stutzeri
GVDGKIWSTPVAKSTGAQALQHRGYRPQPLRRIYIPKSNGKKRPLGIPTMRDRAMQALWKLALEPVAETRADPNSYGFRPQRSTADAIAHCFNALAKRGSAHWVLEADIRGCFDNISHDWLLTNVPMDKVVLRKWLRAGYVDQGALFATEAGTPQGGIISPVLANWTLDGLEDVVHASVASTARKRKPFKIHVVRYADDFIITGATKAVLQHQVRPAIEAFLKERGLELSDEKTQITHISQGFDFLGQNV

SEQ ID NO: 585 - protein, 250 aa, Pseudomonas putida
GVDGKIWATPAAKSSGMESMRHRSYRALPLRRIYIPKSNGQKRPLGIPRMLCRSMQALWKLALEPVSESLADPNSYGFRPNRSTADAIEYCFITLAKRTSPVWVLEGDIRGCFDNFNHEWMLKNIPMDKTILRRWLQAGFIDEGTLFATQAGTPQGGIISPVIANMALDGLEAAVHASVGPTKRARERSKINVVRYADDFVVTGISKEILEHSVLPAVRQFMAIRGLELSEEKTKITHIAEGFDFLGQNV

SEQ ID NO: 586 - protein, 252 aa, unidentified
  REGION 1..252: note = Description of Unknown: gamma proteobacterium HdN1 sequence
GVDKVVWDTPEKKLCAMGDLKRRGYRPKPLKRVHIPKANGKLRPLGIPTMKDRAMQALYLLGLLPVSETTADGCSYGFRPERSVADAIERCFNALGRRDAAAWVLEADIKGCFDHISHDWLLGNVPMDKRVLATWLKCGFMEKAVWFATEAGTPQGGIISPTLANFALDGLEQLLSKTFYRTMRHGKMVHPKVHLIRYADDFVITGSSEELLVNEVKPLVERFLAERGLMLSAEKTKVTHIDEGFDFLGQNV

SEQ ID NO: 587 - protein, 252 aa, Bordetella petrii
GVDRVTWSTPETKSEAVLSLRRHGYRPRPLRRIYIPKANGKKRPLGIPTMRDRAMQALYLLALEPIAETTGDKDSYGFRPGRSVADAIRQCHTVLAWKRSAEWVLEADIEGCFDNISHDWLAENIPMDKAILKSWLKAGYVESGSLFPTEAGTPQGGIISPVLANMALDGLQEVLGKSFFRTRRQNKHYDPKVNFVRYADDFIVTGYSRELLEIEVLPLVEKFLAARGLNISKAKTRVTHISEGFDFLGKNI

SEQ ID NO: 588 - protein, 248 aa, Escherichia coli
GVDGKTWSKPGSKMKAIYTLKRRGYKPLPLRRIYIPKSNGKKRPLGIPTMKDRAMQALYLMALEPVAETTADPNSFGFRPCRSTADAIEQCFTTLHRADRAQWILEADIRSCFDEISHEWLIANIPTDTAILKRWLKAGYIDLGKLYPTSAGTPQGGIISPTLANMVLDGLQPLLKKTFYRGGLNPEKINIIRYADDFVITGISHDTLSEKVLPLLENFLAERGLTLSPEKTRITHISDGFDFLGMNI

SEQ ID NO: 589 - protein, 242 aa, Thermosynechococcus vestitus
GVDGITWSTQEQKTQAIKSLRRRGYKPQPLRRVYIPKANGKQRPLGIPTMKDRAMQALYALALEPVAETTADRNSYGFRRGRCTADAAGQCFLALARAKSAEHVLDADISGCFDNISHEWLLANTPLDKGILRKWLKSGFVWKQQLFPTHAGTPQGGVISPVLANITLDGMEELLAKHLRGQKVNLIRYADDFVVTGKDEETLEKARNLIQEFLKERGLTLSPEKTKIVHIEEGFDFLGWNI

SEQ ID NO: 590 - protein, 251 aa, Azotobacter vinelandii
GVDGETWSTPESKWKAIFRLQRTGYRPRPLRRVYIPKANGQRRPLGIPTMLDRAMQALYLLALEPVSETTADRNSYGFRPHRSTADAIEQLFVNLGRKHSAQWVMEGDIKGCFDNISHDWLIANVPLDKAVLRKWLKAGYLESGQLNPTGAGTPQGGIISPVLANLALDGLEKALESRFGQRNTKASYKTKVNYVRYADDFVITGISKELLVNEVKPVVAAFMAERGLSLAAEKSLFTHVSEGFDFLGQNV

SEQ ID NO: 591 - protein, 252 aa, Escherichia coli
GVDGQTWSSPEVKFLAINLLKRRGYKPQPLKRVYIPKSNGKSRPLGIPTMKDRAMQALYLLALEPVAEVTADQRSFGFRTGRSTADAIAQCFCVLAQKTSAEWVLEGDIRGCFDNISHQWLIDNTSTDRQILTKWLKAGYREKGQLFPVNSGTPQGGIISPVLANIALDGLEALLASEFKKRTVKGRLVNPKVNYVRYADDFIITGESKELLESQVLPVVRRFMAERGLMLSPEKTKITHIEEGFDFLGQNI

SEQ ID NO: 592 - protein, 253 aa, Pseudomonas aeruginosa
GVDGITWSTPEAKSQAMLSIKRRGYRPQPLKRVYIPKTNGKMRPLGIPTMKDRAMQALYLLALEPVAETTADGRSFGFRPERSTADAIEQCFTTLSKKVAPQWILEGDIKGCFDNISHDWLMGHVPTDREILRKWLKAGYMEDRQLFPTEAGTPQGGIISPTLANLVLDGLEAKLDAAFGRKRYANGVQTRLMVNYVRYADDFIVTGRSKELLEQEVMPIIKDFMQERGLTLSPEKTKITHIDDGFDFLGQNV

SEQ ID NO: 593 - protein, 252 aa, Orientia tsutsugamushi
GIDGITKEDYGKKLKANLLSLLTRIRKGQYQAKPARIVKIPKEDGGKRPLVISCFEDKIIESTVSKILNSVFEPIFLKYSYGFHPKLNAHDALRELNRLTYNFNKGAIVEIDITKCFNTIKHCELMEFLRKRISDKKFLRLVMKLIETPIIENDTIVTNKEGCRQGSIVSPILANVFLHYVIDSWFAKISEENLIGQTGMVRYCDDMVFVFESEADAKRFYDVLPKRLNKYGLNINEAKSQMIKSGRDHAAN

SEQ ID NO: 594 - protein, 270 aa, Legionella longbeachae
GIDGVTKEVYGKKLEDNLQDLLARIRRHAYTPQASRLVEIPKEDGSTRPLAISCFEDKIVQMAVTKLLTAIYEPLFLPCSYGYREGKNGHEALRALMKYSNEFRKGATLEIDLRKYFNTIPHGKLLEILEKKITDRRFLKLIRKLIRSPVVANGKAELNELGCPQGSIISPILSNIYLHSVVDSWFDEISKSHLIGKTAMVRFADDMVFLFQRSEDAEKFYKVLPKRLEKYGLQLHVDKSSLLKSGSKEAEEADTRGERLQTYKFLGFTC

SEQ ID NO: 595 - protein, 270 aa, Xenorhabdus nematophila
GIDRMTKAAYGEHLDGNIHNLILRIRRGTYRPKAARITQIPKEDGSKRPLAISCTEDKLVQLAVSDILSRIYEPLFLPCSYGFRPGLNCHAALKALQQQTYRNWNGAVVEIDIRKYFNTIPHIELMSLLRKKISDRRFLRLIEVLITAPVIEGKQVSENVRGCPQGSILSPVLANIYLHQVIDEWFDEISRSHIHGRAEMVRYADDRVFTFEFMSEAERFYKVLPKRLNKYGLELHDDKSQRIPAGHIAALRASQSGRRLPTFNFLGFTC

SEQ ID NO: 596 - protein, 270 aa, Acaryochloris marina
GVDGVTKAEYQENLETNLQNLHLKLRQMSYRPQPVRQVEIPKEDGSMRPLGISCTEDKVVQEMTRRILEAIYEPVFIDTSYGFRPKRSCHDALRQLNREVMRKPVNWVADIDLAKFFDTMPHQEILSVLSIRIKDGNLLRLIARMLKAGIQTPGGVVYDELGSPQGSIVSPVIANIFLDYVLDQWFTNVVRHHCRGYCAIIRYADDVAAVFEHEEDAIRFMRVLPRRLEKYGLRLNTKKTHLLAFGKRNARRCFQTGQRPSTFDFLGLTH

SEQ ID NO: 597 - protein, 270 aa, Stigmatella aurantiaca
GIDRQTAKDYEANLEVNLKSLLERIKSGRYKAPPVRRTYIPKADGSQRPLGIPTFEDKVAQRAIVLLLEPIYEQDFRPFSFGFRPGRSAHQALRELRSSILERNGRWVLDVDLRRYFDTIEHGKLREVLARRVADGVVRRMIDKWLKAGVLEEGPLLRLEQGTPQGGVISPLLANVYLHYVLDEWYEREVVPRMKGKCSLIRYADDLVMVFEDFLDCRRVLEVLGKRLAKYGLTLHPGKTRMVDFRFKRPGGGQHPATQATTFDFLGFTH

SEQ ID NO: 598 - protein, 252 aa, Rhizobium etli
GIDGRTADDYEKDLEANLESLRIRMMSGSYRAPPVRRHYIPKADGSRRPLGIPTIEDKVAQRAIVMLLEPIYEEDFLDCSFGFRPERSAHDAIRTLRDGIMDTGQRWVIDADISKYFDSIDHGHLRSFLDLRIRDGVIRRMIDKWLNAGVLDQGTSSRSVAGTPQGGVISPLLANILLLHVLDRWFVEVVKPRLKRRCQMVRYADDFVMSFEDHLDGRRMLAVLGKRFERYGLRLHPDKTRYVDFRFRRPHG

SEQ ID NO: 599 - protein, 266 aa, Niastella koreensis
GVDEETWIDYHKQRETRIPQLLAAFKSGNYRAPNIRRVYIPKDKGKLRPLGLPTVEDKVLQTAVTRVLRPVYEDIFYHSSYGFRPGKSQHQALEELTRQVSLEGKRYIIDADMQNYFGSINHQCLRDLLDLRIKDGVIRKMIDKWLKAGILDNGQLVYPTEGTPQGGSISPLISNVYLHYVLDEWFYQQIRPLLKGDSFLIRFADDFLLGFTNKEDALRVMHVLPKRLGKYGLMLHPEKTKLIDLTTKKGGPDQEKNTFDFLGFCH

SEQ ID NO: 600 - protein, 267 aa, Sorangium cellulosum
GVDGITKEQYGQDLEHNVRDLHARMKSMRYRHQPIRRVHIPKERGKTRPIGISCTEDKIVQAAVREMLEVIYEPVFRDVSYGFRPGRSAHDALRALNRMLLGGVEWILEADIESFFDSIDRTKLMEMLQARVADKSLLRLVGKCLHVGVLDGAEFYAPEDGTVQGSVLSPLLGNVYLHHVLDLWIEREVQPRLVGKATLIRYADDFIIGFEREDDAKRVTEVLPRRFERYGLKLHPDKTRLLPFGRPDNGQPGGKGPATFDFLGFTH

SEQ ID NO: 601 - protein, 259 aa, Chlorobium phaeobacteroides
GTDGKSWKTYEAQLEERLPKLHEEIHTGSYRAQPVKRVYIPKTDGQKRPLGITAIEDKLVQQAVVTVLNQIYETEFYGFSYGYRPGRAPENALDALATAILKRPINWILDADLQKFFDSIPHDKLMALISIRVGDKRILRLIGKWLKTGYIEDGKRYRQTEGTPQGSVISPLLANIYLHYVVDEWVEQERRRRNNGEVIIIRYADDLVLGFQYKTEAERYLEALSERVQTYGLKLHPEKTSLKEFGRYAEERRRKRGEE

SEQ ID NO: 602 - protein, 262 aa, Sorangium cellulosum
MYGEELDARLLDLQDRILRGSYHPQPVRRVHIPKGSGTRPLGIPALEDKIVQQAVRRGLELIYESMFLGFSYGFRPRRSTHDALDALAVAIGKRKVNWIVDADIRAFYDTIAHAWMQRFIEHRIGDRRLVRLLMKWLHAGVMEDGVLHEVDEGTPQGGIISPLMANIYLHYVLDLWAHAWRKRHARGEVYIVRYADDVVMGFEDGRDARSMRAALSKRLASFGLELHPDKTRVLFFGRYAYEKCERRGLRKPATFDFLGFTH

SEQ ID NO: 603 - protein, 271 aa, Burkholderia rhizoxinica
GVDGVTWQSYEVGLGSNLRDLHRRVHTGSYRALPVLRRYIPKADAGLRPLGVAALEDKLVQSVMVEVLNAIYEEDFLGFSYGFRPGRNQHDALDALAAAIQWRPVNWILDADIRSFFDTVNRQWLIRFVKHRVADPRVIRLIGKWLDAGVLDNGRLMSVQAGTPQGSVICPLLANIYLHYVFDLWIERWRRQRARGTVVVSRYADDTVVGCQHEADALRLMKELRQRMEEFDLTLHPEKTRVLEFGRYAAERRRRKGMGKPQTFAYLGFTH

SEQ ID NO: 604 - protein, 271 aa, unidentified
  REGION 1..271: note = Description of Unknown: uncultured_bacterium sequence
GVDEMTWRKYKEGSPGRIADLNERVHTGSYRAKPVRRSYINKSDGRKRPLGVTALEDKIVQQAVSTILNQIYETDFMGFSYGFREKRSQHNALDALYIGISRRKINYILDADISGFFDKINHDWLLKFLEHRVADRKILRLIKKWLKVGVIEDGKRTSLEVGTPQGSVISPVLANVYLHYAQDLWAHQWRKRHADGDVIIVRYADDSVVGFQYRKDADRFLKDLIERMGQFGLELHPVKTRLIEFGRFAVVNRRKRGERKPETFDFLGFTH

SEQ ID NO: 605 - protein, 271 aa, Azotobacter vinelandii
GVDGMSWREYEEDLHQRVGKLHARLHRGAYRATPSRRVYIPKADGRQRPLGIASLEDKIVQQAVVTVLNAIYEEDFQGFSYGFRPGRSQHDALDALTVALKSQKVNWILDADITSFFDEIDHEWMLMFLGHRIADRRMLGLICKWLQAGVMEDGRRLAATKGTPQGAVISPLLANIYLHYVLDLWARQWRQRHARGEMIVVRYADDSVVGFRTQWQAQRFLVQLQERMARFGLSLNASKTRLIEFGRFAVQNRRRQGLGKPETFDFLGFTH

SEQ ID NO: 606 - protein, 271 aa, Bradyrhizobium japonicum
GVDGMTWQDYEEDLEPRLADLHKRVQRGTYRPQPSRRTYIPKADGKQRPLAIAALEDKIVQGATVIVLNAIYEGDFCGFSYGFRPGRGPHDALDALCTAIETRQVNWIIDADIQNFFGAVSQPWLVRFLEHRIGDKRIIRLIQKWLKAGILEDGVVTADDRGTGQGPVISPLLGNIYLHYALDLWAKRWRQREVSGGMIIVRYADDVVVGFEREDDARRFLDAMRARLEEFELTLHPAKTRLIEFGRHAAAQRKQRGLGKPETFAFMGFTF

SEQ ID NO: 607 - protein, 271 aa, Burkholderia cenocepacia
GVDGVTWHDYEQDLDRNLEDLHGRLRRQAYRALPSRRRYIPKADGKQRPLGIAALEDKIVQRALVAVLNAVYEMDFLGFSYGFRPQRSQHDALDALATGIARTSVSWILDADISRFFDTVDHDWLIRFVEHRIGDQRVIRLIRKWLKAGAMEDGVIEPTDEGTPQGSVISPLLANIYLHYVFDLWANQWRKRHAEGNVVIVRYADDVVVGFDKPHDAKRFRRAMQQRLEQFGLSVHPEKTRLIEFGRFAARNRASRGLGKPETFNFLGFTH

SEQ ID NO: 608 - protein, 271 aa, Serratia marcescens
GVDGIRWMDYAGNMKNNITDLHRRLHQGSYRAQPGRRHYIPKADGKQRPLGIASLEDKIVQYALVKILNAVYENDFMGFSYGFRPGRSQHDALDALATGLVRTNVNWVLDADISQFFDRVSHEWLIRFTEHRIGDRRVIRLIRKWLTAGTSEEGQWRATEEGTPQGAVISPLLANIYLHYVFDLWAHQWRRRYATGNVVMVRYADDIVIGFDKRYDARRFRIAMQRRLREFGLTVHPEKTRLMEFGRFAAENRAIRGKGKPETFNFLGFTH

SEQ ID NO: 609 - protein, 271 aa, Chlorobium phaeobacteroides
GVDGITWKDYGEGLEENLADLHRRIHTGAYRAQPSRRKYIPKANGQQRPLGIAALEDKIVQRAVVAILTPIYEAEFLGFSYGFRPGRSQHDALDALAYGIKVKKIGWVLDADISRFFDTISHEWMIRFLEHRIGDKRIVRLIIKWLKAGVLEDSVRIEAEEGTPQGAVISPLLANIYLHYAYDLWAKQWREKHCKGDMIVVRFADDSVAGFQNKEDGERFLADLKERLAKFALTLHPEKTRLIEFGRYAAKNRQRRGQGRPETFDFLGFTH

SEQ ID NO: 610 - protein, 271 aa, Stigmatella aurantiaca
GVDGVTWEQYAGNLEANVRDLHTRLHRGAYRARPSRRAYIPKADGRQRPLGIAALEDKLVQRAVVEVLNAVYETDFLGFSYGFRPGRSQHQALDALSAGIYLKKVNWVLDADIRGFFDAIDHGWMQKFLEHRIEDTRLLRLVQKWLAAGVMEDGKWTQSKEGTPQGATVSPLLANLYLHYVFDLWSQRWRKRVARGEVIIVRYADDFVVGFQHRSDAERFWRELRERLRSFALELHPEKTRLIEFGLYVAERRRERDQGRPETFNFLGFTH

SEQ ID NO: 611 - protein, 271 aa, Frankia sp.
GVDGVTWTDYGQDLEANLQDLHVRVQSGCYRATPSRRAYIPKADGRLRPLGIASLEDKIVQRAVVEVLGAVYEVDFRGFSYGFRPGRGPHDALDALAVGIWRKRVNWVLDADIRDFFGQIDHSWLRRFLEHRIADKRVLRLIDKWLAAGVVEDGEWTACEEGSPQGASVSPLLANVYLHYVLDLWVDWWRRRHARGDVIVVRWADDFIVGFEYEEDARRFLDELRERFAKFGLELHPDKTRLIEFGRYAARDRKRRGLGKPETFDFLGFTH

SEQ ID NO: 612 - protein, 272 aa, Coprococcus catus
GVDEITKKEYERNLEQNIDDLVERLKRKSYKPQPSIRVYIPKSNGKLRPLGIACYEDKIVQLALKKILEAIYEPRFLNCMYGFRPNRGCHNAIKELYKRLNNTKICYIVDADIKGFFDHMKHEWIIKFLKLYIKDPNIIGLVKKYLKVGVMDNGELMVNEEGSAQGNIISPILANIYMHNVLTLWYKFIITKECKGDNFLIAYADDFVAGFQCKWEAENYYKLLKERMEKFGLQLEDSKSRLLQSGAYIARAKQKSGECIRLQTFDFLGFTF

SEQ ID NO: 613 - protein, 271 aa, Clostridium botulinum
GIDRVTKVEYGANLEENISGLVIRLKNKSYKPLPVLRVFISKGNGKMRPLGIAAYEDKFVQLAIKKILEAIYEPRFLENMYGFRPRRGCHNAIKAAYDRIYENKINYIVDADIKGFFDNMSHEWIMKFLGVYISDPNFLWLINKYLKAGVMTDGTLIDSISGSAQGSIISPVIANVYMHNVLMLWYKFIVLNGIKGKSFLVTYADDFIAGFQYKWEAEKYYIELKRRMAKFNLELEDSKSRLLEFGRFAEGNRKARGEGKPETFDFLGFTF

SEQ ID NO: 614 - protein, 264 aa, Pseudoalteromonas tunicata
GIDGITMPAYQQQLVGNITRLSDALKHKRFRANDIKRVFIPKANGKQRPLGLPTVDDKLVQQGVSQILQSIWEADFLPNSYGYRPNKSAHQALHSLALNLQFKGYGYIVEADIKGFFNNLDHNWLMKMLKQRIDDKAMLSLISQWLKARIKSPEGVFEYPKSGTPQGGIISPVLANIYLHYALDLWFEKKVKPRMRGRAMLIRYADDFVCAFQYANDAERFYEVLPKRLKKFNLEVAEEKTSLLRFSRFHPSRKRQFVFLGFAF

SEQ ID NO: 615 - protein, 264 aa, Dehalobacter sp.
GVDKVTAKEFAEELKQNIENLAEHLEKKRYRAKLLRRVDIPKGEGKTRPLGIPAIADKLVQSAAAKILEAIYEQDFLASSYGYRPKVSAHTAIKDLSKELNYGDYSYIVEADIKGFFQNIDHAWLIRMLEQRIDDKAFVGLIKKWLKAGILKQDGEVEHPITGSPQGGIISPILANTYLHYVLDLWFEKIVKPNCEGEAYLCRYCDDFVCAFQYKGDADKFYRSLPKRLEKFGLELAVDKTQIIQFNRWLRKQSSSFEYLGFEF

SEQ ID NO: 616 - protein, 243 aa, Thioalkalivibrio nitratireducens
MERLKTKRYRTKLVRRCYIPKENGQERALGIPALEDKLVQLACAKLLTAIYEQDFLPVSYGYRPGRDAKEAVGDLGFNLQYGRFGHVVEADIQGFFDHLDHDWLLRMLALRIDDRAFLHLIRKWLKAGILDTDGQVLHPDAGTPQGGIVSPILANVYLHYALDLWFERVVRPRCRGQALLIRYADDYVCAFQYREEAEGFYRVLPKRLAKFGLAVAPEKTRILRFSRFHPGLPRRFAFLGFEL

SEQ ID NO: 617 - protein, 253 aa, unidentified
  REGION 1..253: note = Description of Unknown: unclassified Wolbachia sequence
GIDWVTVEAYGENLKERLEGLVDSMKGKQYQPQPVRRVYIPKAGSKEKRGLGIPSTEDKLVQIMLKKILENIYEANFLDSSYGFRPGRNCHQTVNALDKAVMYKPINYIVEVDIKKFYDNIQHKWLMRCLRERITDPNLLWLIKRFLKAGIVEAGYYEATKQGTPQGGIVSPVLANIYLHYVLDLWLEKKFKPRSRGYIQLIRFCDDFVVCCESKVDAEEFLELLKQRLNKFGLEVSENKTRVVKFGKREWQQ

SEQ ID NO: 618 - protein, 271 aa, Thioflavicoccus mobilis
GIDGISKEQYGANLDENIKELSSRLRNMGYRPQPKRRTYIPKPGSVKGRPLAISCFEDKLVELAIKRVLEPIYEVQFEDSSYGYRPGRSQHQCLDDLGRTIQQSRINTIVEADIRSFFNTVDHAWMLKFLGHRIGDPRIIRLIGCLLKGGILEDGLVQASEEGTPQGSILSPLLSNIYLHYVLDLWFSRRVRPQCRGEAYYFRFADDFVAGFQYRQEAEQFQTALGERLGQFKLRLAEEKTRCLAFGRFARSNAQKQGQKPGEFTFLGFTH

SEQ ID NO: 619 - protein, 270 aa, unidentified
  REGION 1..270: note = Description of Unknown: uncultured archaeon sequence
GIDGVTVGEYAKALDENIADLVARLKAKQYKPQPVLRVYIPKPNGEKRPLGIPAVEDKIVQMALKKILEAIFEQDFIDTSYGFRPNRSCHDALTELDRIIMNVPVNFVVDMDISKFFDTVDHKRLMECLRQRIVDPTLLQLIGRFLKSGIMEEGKYSEMDQGTPQGGVLSPVLANVYLHYVLDKWFENEVLPQLTGFAQLIRYADDFVVCFEKETEARAFGVALRRRMGKFGLTISEEKSKIIEFGRCTCTRAKRYGRKCETFDFLGFTH

SEQ ID NO: 620 - protein, 270 aa, unidentified
  REGION 1..270: note = Description of Unknown: uncultured archaeon sequence
GVDGVTWRKYEENLDENTEDLVTRLIAKQYRPQPVKRAYIPKSNGERRPLGIPALEDKIVQLAIKKILEAIFEEDFCDVSYGFRPNRSCHDALDMVDMIIMTKPVSYVVDMDIAKFFDTVDHECLMECLKQRVVDPSLLRIIARCLKSGVMEEGKYLETDKGTPQGGILSPILANIYLHYALDLWFEKEVKEQLKGFAQLIRYADDFIVCFQHDDEARAFGKTLRERLAKFGLTISEEKSRIIKFGRYACQQARKQSKKCATFDFLGFTL

SEQ ID NO: 621 - protein, 271 aa, Clostridium beijerinckii
GIDDVTKQEYSKELDNNIENLIVKLRNHSYKPQAVKRVYIPKGDGKTRPLGIPSYEDKLVQMALNKILQSIYEAEFKDFSYGFRPKRNCHSAIKALNKVIENGRINYVVDADIKGFFNNVNHEWMIKFLEVRIGDPNIISLVKKFLKAGLMDNGIIKTTEIGTPQGSIVSPTLANIYLHYSLDLWFEKVIKRNFRGQSEITRYADDFVCCFQYESEARQFCRLLVSRLNKFNLEVERTKSKLILFGRFAEEIRKSRGFKNAETFDFLGFTH

SEQ ID NO: 622 - protein, 269 aa, Thermoanaerobacter sp.
GVDKVTWEEYDVNVDENVETLIAKMKRFSYRPQPARRVYIPKANGKLRPLGIPCYEDKLVAAVMADILNEVYENIFLDTSYGFRPGRSCHDAIKELNRIIGRCKISYVLEADIKGFFDNVDQKQLMEFIAHDIDDKNFSRYIVRFLKSGIMEEGKYHESDKGTAQGSPLSPILANIYLHYTLDVWFAYLKRNGKFRGEAYIVRYADDFVMLFQYKSDADKMYEALPKRMAKFGLELAMDKTKILPFGRFAKQNSKDGKTETFDFLGFTF

SEQ ID NO: 623 - protein, 272 aa, Dehalobacter sp.
GIDGETKASYGGNLEENLRNLLEQLKEGSYRPTPVRRKFIPKAGSNKLRPLGIPVLEDKLVQNALVIILESIYEQDFLEDSYGFRPGRSQHDALKDLSRKIGTRKVGYIVDADIRGYFDHVDHEWLLKMLQERISDSKILKLIKRFLKAGVMEEGKLSKTEEGVPQGGSLSPLLGNIYLHYVLDLWFNKIITKQCQGEAYLTRFADDTVACFQYQKDAERFYEALKKRLKKFNLEIAEEKTRIIEFGRYAQRDVQRRGGRKPETFDFLGITH

SEQ ID NO: 624 - protein, 276 aa, Clostridium beijerinckii
GVDKVTKEEYETNLENNIDNLLIRMKTFKYRPQPVRRVYIDKSGSNKKRPLGIPAYEDKVVQLAINKILKSIYEQDFIDSSFGFRQNRSCHDALKILNVYLSEKNVNYVVDADIKGFFDNVDHKWLMKFLEHRIADKNLLRYIGRFLKTGIMENGKFYKVYEGTPQGGIISPTLANIYLHYVLDIWFNNFIKKKCKGQAYIVRYADDFVCCFQYEDEAKAFYEALKNRLDKFNLQVAEDKTKILYFGKNAYYDRKFKRAKLESYKDRTFDFLGFTH

SEQ ID NO: 625 - protein, 272 aa, Moorella thermoacetica
GIDGITKEQYGDNLEANIQSLLERLKRKAYRPQPVRRVYIPKPGSDKKRPLGIPAYEDKIVQLAASKILNAIYEAEFLDMSFGFRPQRGCHDALKLLNYLIVARKVNYIVDADIKGFFDHVNHDWLMKFLGHRIADPNFLRFIRRFLKAGIMENGELRDATEGTPQGGIVSPILANIYLHYVLDLWFEKAVRKHCRGEAYMVRYADDFICCFQYKHEAEAFYRALKARLAKFSLSVAEEKTKIIPFGRFATQWCKRMGQNKPDTFDFLGFTH

SEQ ID NO: 626 - protein, 272 aa, Syntrophomonas wolfei
GVDQVTKQAYEENLEANIADLIGRMKRQAYKPQPVRRVYIPKEGSNKRRPLGIPSYEDKLVQKGLARILNTIYEQDFLDCSFGFRPGRGCHDALKVLNHIIERKKVNYIVDADIRGFFDHVDHEWMMKFLELRIADPNLLRLIKRFLKAGVMEAGIVYDTPKGTPQGGIVSPILANIYLHYVLDLWFEKVVKKRCQGEAYLVRYADDFVCCFQNKSDAEWFYANLRERLNKFNLEVAEEKTRIIAFGRFADKESKKQGRKKPDTFDFLGFTH

SEQ ID NO: 627 - protein, 215 aa, Desulfotomaculum carboxydivorans
MRRQYIPKKNGKLRPLGIPNIEDRIVQQAIVNVLSPKCEEHIFHKWSCGYRPNLGIKRVMQIILWNIETGYNHIYDCDIKGFFDNIPHKKLMKVLTKYIADGTVLDMIWAWLKAGYMEEGKFHPTDSGTPQGGVISPLLANLYLNELDWTLEEHGVRFVRYADDFLLFAKSKEDIERAAEVAKTTLDELGLEVSIEKTRFVDFDKDDFNFVGFSF

SEQ ID NO: 628 - protein, 323 aa, Shimwellia blattae
GINNNTMDEMSVGRIINLIQLINSGSYKPRPCRRTHIPKDARKPNGKKRPLGIPTGDDKLIQEVMRMLLEEIYEPVFSDWNYGFRPKRSCHSALKEIRNSWKGTKWVCDVDIKGYFDNIDHDLLLKFLSKRIADNKFLALLKKFLKAGYLDNWRYFGTHSGTPQGGIISPILANVFLHKLDEFMKNRISEFGKGGRRKPNPIYKRALQNRANRIKWIRQGFGASGMPADEQKIQKWRHEADELEKKLRTLSSVIMDDSEFKRMRYVRYADDFLIGVTGSKNEAKKIMKEVVDFVETELHLEISKEKSGIIDPKKGFTFLGYEI

SEQ ID NO: 629 - protein, 317 aa, Novosphingobium aromaticivorans
GVDGQTFDGFSPDKVRSIIERLANGTYRPQPARRVYIPKANGQKRPLGVPTTEDKLVQEVVRTILEQIYEPLFSRHSHGFRPKRSCHTALESIRAIWTGVKWLIDVDVVGFFDNIDHDVLVSLLEKRIADRRFVRLIRGLLKAGYVEDWVFHKTYSGTPQGGVVSPMLANIYLHELDMFMQAKMAGFDKGKQRSPSPDARRIRNRLSYVRRTVDQLRAKGRGDDPRVTSFLEEIGRLKAERLAVPASDAFDPNYRRLRYCRYADDFIIGVTGSKSEARQIMEEVRTYLSDHLKLAVSAEKSGIHKASDGARFLGYEV

SEQ ID NO: 630 - protein, 317 aa, Novosphingobium aromaticivorans
GIDGKTFEDFGPDRLAPLIASVATGAYKPKPVRRVFIPKGKGKRRPLGIPTRDDRLVQEVARQLLERIYEPVFSKASHGFRPGRSCHTALEHVKAVWTGVKWLVDVDVAGFFENIDHDILLKLLRKRIDDERFIDLIRDMLKAGVMEGRAHTQTYSGTPQGGIVSPILANIYLHELDEFMAGRITAFEKGKTRATNPEYRRLAGRIAKRRERLKRLEASDNADQVTVKAILAEINTLSKQMRSLPSRDAMDAGFRRLRYCRYADDFLIGVIGSKDDARGVFAEVRTFLTEVLALTVSEEKSGIRKASDGTKFLGYEV

SEQ ID NO: 631 - protein, 318 aa, Bacillus cereus
GTINNTVDGFSKNRVSKIINNIKNGNYKPTPVKRVYIDKKGSKKKRPLGIPTFDDKLVQLVIKYILEAIYEPNFSENSHGFRKNRGCHTALKQIKKSGSGTKWFIEGDIQGFFDNIDHHILINLLRKRINDETLIGLIWKFLRAGYMEDWQFHKTFSGTPQGGILSPLLANIYLNELDIYMEKYAERFGKGQPKDREVDKRYQYLHLKIKRGRKKADLLREQGKLNESQELIHQVNEWIKERGQRPYYNPMSDKFKSLKYVRYADDFIVMLIGSKDDANAIKSDIAQFLNEELKLTLSEEKTLITHSSKKAKFLGYNV

SEQ ID NO: 632 - protein, 303 aa, Herpetosiphon aurantiacus
GSTDETIDGMSMAKIHRIIADLRRETYRWTPVRRVYIPKATGKTRPLGVPTWSDKLVQEVLRSILDAYYDPQMSDHSHGFRPNRGCHTALKAIQRCWTGTRWFIEGDIAQYFDTINHTTLLTILAKRIHDGRFLRLIQTLLQAGYLHDWVYHPTLSGTPQGGVISPLLANIYLHEFDQFVEHTLIPAYTKGQRRKVNPAYAQMEQRISKLRRQREYASVTPLLKELRTLPSRDVHDPDYRRLRYVRYADDFLLGFAGTKVEAEAIKQQINVWLYDHLQLKLSTQKTLITHASSDPAHFLGYDI

SEQ ID NO: 633 - protein, 302 aa, Streptococcus anginosus
GVTEETIDGMSIQKIDMIIEQLRQETYYWRPARREYIPKKNGKHRPLGIPVWSDKLLQEVIRMILEAYYEPQFSEHSHGFRPKRGCHTALQEIQTWQGTHWFIEGDISSYFDTIDHCVLITMLSKQIQDGRFIRLIKNMLEAGYLDDWKFRKTISGTPQGGVISPLLANIYLHQFDKWVGEELIPQYTRGKKQKANSAYNRLSRKIKFYQDKGEYKKAHQIIVERRNIPSVDTYDTNYRRLRYVRYADDFILGFTGSKAEAKDIKKQIGDFLNIKLHLELSQEKTLITHATEESAKFLGYEI

SEQ ID NO: 634 - protein, 302 aa, Syntrophobotulus glycolicus
GVDNRTIDGFKYEMIDTLIEKLKTEQYYPKPVRRTYIPKKNGKTRPLGIPCFEDKLLQEVIRQLLESIYEPIFSDNSHGFRPDRSCHTALCQIKNTMRGANWVIEGDITGCFDNIDHTILLNILSQKIEDGRFIELIRRFLKAGYLEFKQMHRSLSGCPQGGIISPILSNIYLNEFDRYMDEIINKNTKGKKRRSNPEYQRLRGKRYTAIKKGNLEEIKRLTKEIQSIPSLDPMDSNFTRVKYVRYADDFVIEVIGSKEMAESIKEDVATFLKEKLNLELNQEKTLITNLGNEKANFLGYEF

SEQ ID NO: 635 - protein, 315 aa, Bacillus cereus
GTDKETIDGFSMDWIENIISSLKDESYKPNPSRRVYIPKKDDKQRPLGIPSIKDKIIQEVVKEILVSMYEPIFSKASHGFRPNKSCHSALNDIKMTFGGIKWWIEGDIKGFFDNIDHHVLIGILRKRIKDEKFIKLIWKFLKAGYMEDWKFNKTFSGTPQGGIISPVLANIYLHELDAFMEKQIIKFDEGKRRRDNPVYKKYNTAIWYRKNKLKEKWNTLNDDERKELQSEISTLEKEREKHSAVDNMDASFKRLKYVRYADDFVVGVIGSKEDSKRIKEEITEFLHTSLKLELSQEKTLITSNKNLIKFLGYEI

SEQ ID NO: 636 - protein, 316 aa, Bacillus thuringiensis
GVDQRSIDGFSMKEVEDLISVLKSKSYQPYPSRRTYIEKKNGKKRPLGIPSFYDKLVQEVIRMILEAIYDSSFSSSSHGYRKGKGCHSALLEIKRTFTGSKWFIEGDIKGFFDNIEHHTLVTILKRRIKDEAFIELIWKFLRAGYLEEWKFHNTYSGAPQGGIISPIISYIYLNELDTYMKKYQDRFESGKKRQINKEYSNLQYKVRKIQEKIDTAYLNGEVTRITELKEQQKVLKGKLLQTPYNNPMDENYRRLKYVRYADDFLIGVIGSKEDAILIKNEIASFLKEEIKLELSMEKTLITNAFKKHAKFLGFEI

SEQ ID NO: 637 - protein, 312 aa, Streptococcus pyogenes
GVDNQTISAMSLERINKIIDSLKDESYSPTPTKRVYIPKKNGKLRPLGIPSIGDKLVQEVCRMLLNSIYDESFEDTSHGFRDNRSCHTALRQIQNRFVRCKWFVEGDIKGFFDNIDHNIMIDILSKRIDDERFLRLIRKFLKSGYMEQNQYHNTYSGMPQGSIISPILSNIYLDKFDKYMQNYKESFDKGNKRKQNKEYKALYDRRKRLENKLSKTTNKTEIDDIKSEIEEINKRYFNIPCLNPMDENFKRIQYVRYADDFIIGIIGSKADAEMVKQDIGQFIKSELNLELSDEKTLVTKSTDRAKFLGFDI

SEQ ID NO: 638 - protein, 315 aa, Clostridium sp.
GTDGKTIDGMGMARINALIEKMRNSSYQPNPARRTYIPKSNGKMRPLGIPSFDDKLIQEVVRLILESIYEPTFSDHSHGFRMNKSCHTALKYVQKYFTGTKWFVEGDIKGCFDNVDHHVLIAILRKRIADEQFIGLLWKFLKAGYMEDWNYHNTYSGTPQGSIISPILANIYLNELDHFMAEYAEKFNCGDRRRINPAFKKKLDVCRGKEERLKRNISKMSEEEKEGLLAEISELRRSLRSMPYSDQMDEGYKRVFYIRYADDFLIGVIGRKADAEQVKQDVGHFIRENLHLEMSEEKTLITHGHDFAKFLGYEV

SEQ ID NO: 639 - protein, 312 aa, Odoribacter splanchnicus
GTDGKTEDEMSIDRINKLIESIKDETYSPNPAKRIYIPKKNGKMRPLGIPSFEDKLVQEAVRMVLEAIYEGHFEWTSHGFRPNRSCHTALKSLQNNFNGAKWFIEGDIKGFFDNIDHDVLIEIMKGRIADDRFLRLIRKFLNAGYMEEWQFNKTYSGTPQGGIISPVLANIYLDKFDKYMNEYANKFNKGTVRSRNKDICKLNSRVHYLKRRINEVEDVNVRTRMVEELHEKQKRILTMPSGNDMDRNFRRLRYLRYADDFLIGVIGTKNECETIKADITKFMQEKLRLEMSQEKTLITNAQDSAKFLGYEI

SEQ ID NO: 640 - protein, 312 aa, Bacteroides fragilis
GTDGQTISGMSIKRIQSIIDKLRDESYQPHPAKRIYIPKKNGKQRPLGIPSFEDKLVQKVIQMILESIYEGSFEKCSHGFRPHRNCHTAMASIMEGFDGTRWFIEGDIKGFFDNIDHDIMITILSERIADERFLRLIRKFLNAGYLEKWKFHKTFSGTPQGGIISPILANIYLDQLDKYVVEYISQFNRGKMRKRNPEYKRIASRKDKRVKKLKTETDEQKRAALRSEIVELHREMQKHPATLDMDEDFRRMRYVRYADDFLIGIIGSKDDCVNIKADIKRFLCEKLKLELSDEKTLITHGHDHAKFLGFEV

SEQ ID NO: 641 - protein, 312 aa, Streptococcus pneumoniae
GVDELTIDGMSIARIDQLIDSLKDESYQPHPSRRTYIPKKNGKLRPLGIPSFDDKLLQQVIKMILEAIYEGQFEPSSHGFRPNKSCHTALTQIQKTYTGTKWFIEGDIKSFFDNINHDVMIHILRERITDERFLRLIRKFLNAGYVEDWKFYKTYSGTPQGGIISPILANIYLDKFDKYMTDYVKNFCQGKYRKRTPEYRQNEIALGKARRALECVSTENQRQEVIQRIRQLEKERVLIPHSDPMDSSFKRLTYTRYADDFICGVIGSKEDAHRIKADIKDYLEAVLKLELSVEKTLITNARDKAKFLGYHL

SEQ ID NO: 642 - protein, 312 aa, Bacteroides thetaiotaomicron
GADGKTIDGMSIDRVEQLIGSLKNETYQPNPSKRTYIPKKNGKKRPLGIPSFDDKLVQEVVRMILEAIYEGSFEHTSHGFRPKRSCHTALIDIQKTFTAVKWFIEGDIKGFFDNINHDVLINILRERIADERFLRLIRKFLNAGYVEDWVFHRTYSGTPQGGIISPILANIYLDKFDKYIKEYINRFNKGVTRKGDARYKLYEQRRYRLAKKLKNEKDVKVRKQMTAEIKRLREERNNYPARNEMDSSIKRLKYVRYADDFLIGITGNLEDCKTVKEDIKNYLNEALKLELSDEKTLITNAQKPAKFLGYDV

SEQ ID NO: 643 - protein, 312 aa, Alistipes finegoldii
GSDGKTIDGMSLKRIENLIDALKDESYQPKPARRTYIPKKNGNMRPLGIPSIDDKLVQEVLRMLLEAIYEGSFENTSHGFRPKRSCHTALIQVQKNFTAAKWFIEGDIEGFFDNINHDVLIGILKERIADDRFIRLMWKFLKAGYIEDWTFHRTYSGTPQGGIISPILANIYLDKLDKYMKEYACQFDRGDRRAMNLEYKRYSRKIWWLGTKLKQTKDKDTRKELIDAIKQHQKNRMHLPSVDEMDEGYRRIKYVRYADDFIIGVIGSKSDCEAIKEDIKNFLGEKLKLTLSEEKTLITHGNRKAKFLGYEI

SEQ ID NO: 644 - protein, 312 aa, Alistipes finegoldii
GSDGRSIDEMSLARIETLIASLKDESYQPHPSRRVHIPKKNGKTRPLGIPAFEDKLVQEVVRMILEAIYEGHFETTSHGFRPKRSCHTALLHIQKTFSGAKWFIEGDIKGFFDNIDHDVLVGILRERISDDRFIRLIRKFLKAGYVEDWTFHNTYSGMPQGGIVSPILANIYLDKLDKYVKEYIRHFDMGTKRRPGKESNDLANERKRTVRKLKKVKDGTEKAALVARLKAIEQERAAFPSGDEMDGSYRRLKYIRYADDFILGVIGSKEDALRIKEDIKSFLSESLALELSEEKTLITHTGKSAKFLGYEI

SEQ ID NO: 645 - protein, 293 aa, Streptococcus equi
GTDGKTIVEIQKLPIEMVIKTIRNKLNYYQPKNVRRVEIPKDNGKTRPLGIPSIWDRLIQQCVLQVLEPICEAKFHERNNGFRPYRSTQNAIAQCYKMAQIQNLHFVVDVDITGFFDNIDHSKLIRQLWGLGVQDRKLIMIIKQMLKADILFKDIVITPETGTPQGGILSPLLANVVLNELDWWVANQWEMFKIKEGSTGYEFTKVDNEGNILTIDRTQKWNKLRAKTGLKEMYITRYADDFKIFCRDYATAVKVMKATNLWLAENLHLQTSDEKSGITNLRKNYTTFLGIKF

SEQ ID NO: 646 - protein, 290 aa, Enterococcus faecium
GTDGTIIKDIGKLPAETVVKKVRYIVAGSPHGYRPKPVRRKEIPKPNGKTRPLGIPCMWDRLIQQCIKQVLEPICEAKFSENSYGFRPNRSVENAIKATYNRLQISQLHYVIEFDIKGFFDNVNHSKLIKQIWAMGIRDKHLIFILKRILKAPIKMTNGTITYPEKGTPQGGIISPLLANIVLNELDHWVESQWQENPVTKNYVVHINKSGSPCKSNAYKEMKKTKLKEMYMVRYADDFRVFCRYKESAEKAKIAITQWIEQRLKLEVSQEKTRIVNVRKRYSDFLGFKI

SEQ ID NO: 647 - protein, 290 aa, Eubacterium siraeum
GTDKLKISDIGKLTADEVTARVRRIVKGGKNGYTPRSVRRKEIPKPNGSTRPLGIPCIWDRLVQQCIKQVMEPICEARFSNNSYGFRPNRSVENAIAAIYRLMQRSGLYYVVEFDIKGFFDNVDHSKLIKQLWSLNIRDKELLYVIRRILKAPILMPDGHIEHPAKGTPQGGIISPLLANVVLNELDHWIESQWQCNPVTENYSYRENATGCPIQSHAYRAMRNTRLKEMYIVRYADDFRILCRTKEQADRTLIAVTHWLKERLRLDVSPEKTRVVDTRRSYSEFLGFKI

SEQ ID NO: 648 - protein, 285 aa, unidentified
  REGION 1..285: note = Description of Unknown: Bacillus_extraction anthracis sequence
ACDNVNIKNIEGMEQSYFLNEVKRRFQNYQPQKVRRKEISKPNGQTRPLGIPAMWDRIIQQCILQVMEPICEAHFSNRSYGFRPNRSAEHALADASVRVNKQNLTYVVDVDIKGFFDEVNHVKLMRQLWTLGIRDKQLLVIIRKILKAPVQMPDGTTMFPTKGTPQGGILSPILANVNLNEFDWWISRQWETFKAKKVKPRCMRGIWCNDVVTTQLTKTSKMKPMYIVRYADDFKIFTNTRSNAEKIFKATQMWLEERLKLSISAEKSKVTNLTKQQSEFLGFTL

SEQ ID NO: 649 - protein, 286 aa, Enterococcus faecium
GIDGKTIKDIEKLTTERYLDIVKKRFKFYKPRKVKRTEIPKPNGKTRPLGIPSIWDRVAQQCILQVLEPICEAKFNPHSHGFRPNRSAEHAIADCAKKMNIIKMGYCVDIDIQGFFDEVWHSKLMRQMWTMGIRDKELLTIIRKMLKAPVVLPNGTIQFPEKGTPQGGILSPLLANINLSEFDWWVSEQWETRHMSEIKTQYNANGTEHMGNHHRKMRSHTKLKEFYIVRYADDFKLFCHNRKTAELLYHASIQWLEQRLHLPVSIEKSKITNLRKESSEFLGFNL

SEQ ID NO: 650 - protein, 287 aa, Carnobacterium sp.
GVDDITIKDIENLEQTIFVEMVRKRFSNYSPRKVRRVEIPKPNGKTRPLGIPSIWDRIAQQCILQVIEPICEAKFNKHSYGFRPNRSTEHAIADMLFRINQQKLHYVVDVDLQGFFDEINHKKLMNQVWTLGIHDKQLLVIIRKMLSAPIVLKNGSIMHPVKGTPQGGILSPLLANISLNEFDWWISNQWETFETRKKYAAAVMGNGTKNRGLTYRMLRKNSKLKEIYIVRYADDFKLITSNRRDAEKIFIASQMWLKERLGLPISKEKSKITNLRKEESEFLGFTI

SEQ ID NO: 651 - protein, 286 aa, Bacillus cereus
GIDGVTIKDVEKLSQEDFIKIVQKRFSNYTPRKVRRVEIPKPNGKTRPLGIPSMWDRIAQQCIKQVLEPICEAKFNKHSHGFRPNRSPETAMADATLRVNRSHMQYVVNVDIQGFFDEVNHKKLMRQLWTMGIRDKQLLVIIRKMLKAPIVLPNGEMQYPNKGTPQGGILSPLLANINLNEFDWWITNQWEDRLLKELSLTIKKGGHVDKYPHYSKMRKTTALKEMYIVRYADDFKIFTATKSNAQKIFKACEMWLQERLKLPISKEKSKITNLRKESSEFLGFEI

SEQ ID NO: 652 - protein, 272 aa, Enterococcus sp.
GVDGITISDIERLNENDFVEIIRANLSNYRPGPVRRVYIPKKNGKKRPLGIPNLYDRIIQQTIKQVIEPIVEAKFFKHSYGFRPLRSVEQAMGRMHSVINNVQLHYVVDVDIKGFFDNVNHNLLRHQIWNMGIRDTKLIAIISKILRAEIVGEGTPVKGTPQGGVLSPLLANIVLNDLDQWIASQWENFPSKHRYSRGKLHRALKGTTLKEGYLVRYADDFKLLTRSYSMAKRWYTAIRGYIEKHLKLEISPEKSGITNLRKKRTEFLGFEI

SEQ ID NO: 653 - protein, 273 aa, Halobacillus halophilus
GTDGKTIDDMKELSENDLVNEVRSKLQNYHPKKVRREWIEKENGKWRPLGIPCILDRVIQQCFKQVLEPIVESQFFKHSYGFRPLRSAHHAMARIQFLINHSQLHYVVDVDIKSFFDNVNHRLLKKQLWNIGIQDRKVLACISKMITSEIDGEGVPDKGSPQGGILSPLLSNVVLNDLDQWVADQWEVFPLTKSYSSDDARRRARKQTNLKQGYLVRYADDFKILCRDGKTAQRWYHAVRLYLKERLKLDISPEKSQIVNLRKRESEFLGFTI

SEQ ID NO: 654 - protein, 273 aa, Enterococcus faecalis
GTDSFTIDNYKEMNQAEFIHLILSQLENYKSKSIKRVMIPKPNGEKRPLGIPCMIDRIIQQMFKQVLEPICEAKFYEHSYGFRPLRSAKHALGRIMYLINISKMHYAVDIDIKGFFDNVNHRLLIKQLWNIGICDKRVLAILSKSLKSPIQGEGISSKGTIQGGIISPLLSNVVLNDLDHWVSKQWHTFETKYPYTKGYNKFRALRDTNLKQGYIVRYADDFKIMTNDYPSALKWFHAVKLYLKDRLKLDISNEKSKIVNLRKRKSEFLGFTI

SEQ ID NO: 655 - protein, 273 aa, Bacillus thuringiensis
GIDSFAIDQYKSMDKAEFLNLVRNRLNQYKPKAVKRVFIPKPNGDKRPLGIPTMFDRLIQQMIKQILEPICEAKFYEHSYGFRPLRGARHAISRVMYLISRNTFHYAVEIDIKGFFDNVNHTLLLKQLWNMGIKDKRVLKLIYLILKAPIKGVGIPRKGTPQGGILSPLLSNVVLNDLDQWIARQWHHFQSDYDYTEPGNRSRALKRTKLKQGYIVRYADDFKIMAKDFRTAQKWFMATKLYLKERLKLDISPGKSRIINLRKNKSEFLGYSL

SEQ ID NO: 656 - protein, 273 aa, Bacillus cereus
GTNGHTIKHLNKIDADKLIRLTQKRLENYMPHAVRRLFISKPNGKMRPLGIPTIEDRLIQQMFQQVLEPIVEGKFHPQSYGFRPKRGTHDALARCYHMVNHSHQHFVVDIDIKGFFDNVNHKKLMRQLWTIGIRDKKVLSIIKKMLKAEVTGEGIPVKGTPQGGILSPLLANVVLNELDWWVSNQWETKPTRVPYKLKRNKTDALKKTRLKPMYLVRYADDFKIFTNSYDNARKIKIAVEKWLKERLGLEISEEKSKITNLRKNGTDFLGIRF

SEQ ID NO: 657 - protein, 274 aa, Dehalobacter sp.
GTDGLTIKDIAGMTNQEVITMVKRRLKNFTPQSVRRVEILKDNGQNRPLGIPTMSDRLIQACIYQILEPICEARFHNHSYGFRPTRRTEHALATMHRMINIQHLHFVVDVDIKGFFDNVDHGKLLKQMWTMGIQDKNLLCIISAMLKAEIEGIGIPNKGVPQGGLCSPLFSNVVLNELDWWISDQWESYETSYPYKRNEGKIRAIRRGSKLKECYIIRYCDDFKIMCPTRDVAERMFVAVKLWLKERLNLEISSEKSKITNLRKKSSEFLGFKI

SEQ ID NO: 658 - protein, 273 aa, Clostridioides difficile
GTNKRTIIDVGEENPYQLVQYVQNRFNNFQPHSIRRVEIPKPNGKTRPLGIPTIEDRLVQQCIKQILEPILEAKFHKHSYGFRPERSSHHAIAIFQQWTFKGFHYVVDIDIKGFFDNVNHGKLVKQLWTMKIRDKTFISILSRMLKAEVKGIGKSTKGTPQGGILSPLLANVVLNELDWWIDSQWDGFPTKRKYSSLLSKTQSIRKYSNLKEIKIVRYADDFKIMCKDYHTAQKIFLATKQWLKVRLDLDISPEKSKVTNLRKNYSDFLGFKL

SEQ ID NO: 659 - protein, 286 aa, Enterococcus mundtii
GVDNKNIDDLKSIPDTDFISIVQTKLSEYKPQPVKRVEIPKPNGKTRPLGIPTIWDRIVQQCLLQVLEPIMEAKFHDKNYGFRPNRSAHHAFAQAVRMAQVSKLTFVVDIDIEGFFDNVNHSKLIKQLWSLGVRDKWLLGVIRAMLKAPIIHKDGHIEHPKKGTPQGGILSPLLANVVLNELDWWISSQWETHPTRHNYDWYHAEKEYWNKGNKYRALRGTSLKEIYIVRYADDFKIFCRKRSDADKIFLATKLWLKERLKLDISQEKSKVVNLKKQKSEFLGFTL

SEQ ID NO: 660 - protein, 286 aa, Clostridium cellulolyticum
GTDTLNIKDIEKLSVEKLVEMMQRKLAWYQPKPVKRVEIPKPNGKTRPLGIPTIVDRLVQQCILQVLEPICEAKFYERSNGFRPNRSAEHAMAQCYRMVQKQNLYFVVDVDIKGFFDNVNHSKLIRQMWAMGIRDKQLICIIKQMLKAPVVMPDGETLYPTKGTPQGGILSPLLANIVLNELDWWISSQWEDMLTHREYYVSVNNNGSLNKSGVFRTLRRSALKEMYIVRYADDFKIFCRKRSDANKIFVAVKKWLKDRLKLEISEEKSKVVNLKKHYSEFLGFQF

SEQ ID NO: 661 - protein, 286 aa, Streptococcus anginosus
GVDGRTIKHLSRLNEEEYISLIQKQFHWYKPRPVKRVEILKPNGKIRPLGIPTIVDRIVQQCILQILEPICEAKFHDSSYGFRPNRSTEHAIAECARLMQIQHLHYVVDIDIQGFFDNVYHAKLIRQLWNLGIQDKKLLCIIKEMLKADIVMPDKEVITPTKGTPQGGILSPLLSNVVLNELDWWVSSQWLTMPTHYPYKQRTNSQGTEIKSHTYRALRTSNLKEIYIVRYADDFKIFCRNYYDAKRTYQAVTKWLQDRLKLNVSEEKSKITNLKQRYSEFLGFKL

SEQ ID NO: 662 - protein, 286 aa, Enterococcus faecalis
GVDKRTIADLAKLSEEEYVRLIRKQFSNYHPGPVRRVEIPKPNGKTRPLGIPTIVDRIVQQCILQVMEPICEAKFSENSNGFRPNRSAETAIAQCMRLIQVQHLYHVVDLDIKGFFDNISHTKLIRQIWALGIRDKKLLCIIKEMLKAPVVLPNGEKTYPARGTPQGGILSPLLANIVLNELDWWIASQWEEMPTKTKFKTRSNAQGTEIKSHAYRALRRSRLKEMHAVRYADDFKIFCATHEDAVRAYKATELWLKDRLGLEISPDKSKVVNLKRQYSDFLGFKL

SEQ ID NO: 663 - protein, 273 aa, Halobacteroides halobius
GTNNKTIKDLEEKSTEELVEYVRNRLEYYVPQSVRRVYIPKPDGRKRPLGIPTIKDRLIQQCIKQVLEPICEAKFHNHSYGFRPNRSTKHAIARIMYLINFSKLHYTVDIDIKSFFDNVDHNKLKKQLWSMGIRDKKLISILGNMLEAKIEGEGVPEKGTPQGGIISPLLSNIVLNEMDWWISNQWETFKTDYKYNRKGDKITAIKKTNLKEIYIIRYADDFKIMCRDFETASKIKIATIKWLKERLNLEVSEKKTSITNLKKNHTEFLGIKL

SEQ ID NO: 664 - protein, 288 aa, Clostridium botulinum
GTNHKTINDIAGESEDEIIEYVRKRLNKFYPHSVKRIYIPKNNGDKRPLGIPTIEDRLIQRSILQVLEPICEAKFHPHSYGFRPNRSTEHAIARAMTLINMNKLHYVVDVDIKGFFDNVNHGKLLKQLWTLGIKDKKLIKIISLMLKAQIKDGSMITNPVKGTPQGGIISPLLANVVLNELDWWISSQWETFETKHNYSKLRTFKNGTTTIDKSHKYRALRNGKLKEIYIVRYADDFKVFCKNPKDAEKIFIAIKLWLKERLDLETSPEKSKVTNLRKHPTEFLGFEL

SEQ ID NO: 665 - protein, 283 aa, Bacillus thuringiensis
GSNDTTILEIAEQNLTTFVAKVQKALENYNPKPIRRVYIPKRNGDKRPLGIPTMEDRIVQQCIKQILEPICEAKFYNHSYGFRPNRNAKHAIVRAMSLMNISKFHYVVDIDIKGFFDNVNHGKLLKQIWSLGIRDKSLLSIISKILKTEIENVGKMEKGTPQGGIISPLLSNIVLNELDWWISSQWETMITRHNYESIDKRNNTIIRSHKYTALRRTSNLKEMFLVRYADDFKIFCKDFNSAQKTLIAVKKWLKNRLGLEVNNEKSKVTNLRRNYTEFLGFKL

SEQ ID NO: 666 - protein, 274 aa, Lysinibacillus sphaericus
GTDGITIEQYKIEDVETFVDEIRATLKNYKPQTVRRVEIPKPNGKTRPLGIPTMRDRLIQQMFKQILEPICEARFYNHSYGFRPNRSTHHAMGRCQFLANIALNQHVVDIDIQGFFDNVSHSKLLKQMYSIGICDKRVLSVVSKMLKAPIKGIGIPTKGTPQGGILSPLLSNIVLNDLDWWISNQWENMKTKFNYKERKNKVLMIKRTTTLKEMYIVRYADDFKIFTKSHKNAIKLYHAVKGYLKNHLNLDISNEKSKITNLRKRASEFLGFSL

SEQ ID NO: 667 - protein, 272 aa, Enterococcus mundtii
GTDGITIDDYKLANIEIFVSYIRSVLSNYKPQKVRRVYIPKSNGKKRPLGIPTMRDRIIQQMFLQILEPICEAQFYNHSYGFRPNRSTKHAMARCKFLTRKNFHYVVDIDIKGFFDNVNHNKLIKQLYTIGIKDKRVLAILAKMLKATIEGEGIPKKGTPQGGILSPLLSNVVLNELDWWIANQWEFLKTKENYHPAARLKSLKRKTTLKEMFIVRYADDFKIFTKDHQSAIRIYHGVKGYLSNHLSLDISPEKSKITNLRKRDSEFLGFSL

SEQ ID NO: 668 - protein, 273 aa, Clostridium kluyveri
GVNTNTIMDIGEENPDELAIYVRERLINYKPQPVRRVEIPKPNGKMRPLGIPTIEDRIIQQCIKQVLEPICEAKFHKDSYGFRPNRSTHHAIARTYSLANINKLTYVVDIDIKGFFDNVNHSKLLKQMWTMGIQDKNLLCVISKMLKAEIKGVGIPNKGTPQGGILSPLLSNIVLNELDWWISNQWQTLKSKFPYKREIFKYQALKRSKLKEVYIVRYADDFKLFCRSYNNAKKIFKAVTMWLKERLGLEINEEKSSIVNLKQKYSEFLGFKF

SEQ ID NO: 669 - protein, 273 aa, Enterococcus faecium
GTDGMTIDDIKQLSNAEIVATVRESLSNYRPKSVRRVFIPKAGSDKMRPLGIPCIWDRLVQQCILQVLEPICEPKFHNHSYGFRANRSAHHAVSRVTTLINLSKYHYCVDVDIKGFFDNVNHGKLLKQIWTLGIRDKRLICIISKMLKAEIDGEGVPEKGTPQGGLLSPLLSLIVLNELDWWVSSQWETFQPKNRSKNGWLQYAKKYTKLKSGFIVRYADDFKIMCSTYGEAQRFYHSTVDFLNKRLKLEISPEKSKVVNLKKNSSDFLGFKI

SEQ ID NO: 670 - protein, 275 aa, Bacillus cereus
GVDNLTIKDIWHLNDTKIIHEVRKRLNNYQPQAVKRVLIPKEGSDKKRPLGIPTIWDRLVQQSILQVLEPICEAKFHNHSYGFRPNRSTHHALSRVVSLINIGHQHYCVDIDIKGFFDNVCHKKLLRQMWTLGIRDKSLLCVISKILKSEIEGEGIPNKGTPQGGIISPLLSNIVLNELDWWISSQWETYKPHRISTRHLGFRQYARKYTNLKCGYVVRYADDFKIMCRTYDEAQRFYHATVDFLKSRLGLEINPKKSKVVNLKKNSSVFLGFKI

SEQ ID NO: 671 - protein, 275 aa, Bacillus thuringiensis
GVDGLTIKDVRQLNDFQVINQVRKRLMNYRPSPVRRVYIPKEGSDKKRPLGIPTIWDRLVQQCILQVLEPICEAKFHNHNYGFRPNRSTHHALSRMVSLINVGKHHYCVDIDIKGFFDNVQHGKLLKQMWAIGIRDKRLLSIISNLLKAEIIGEGIPSKGTPQGGILSPLLSNIVLNELDWWISNQWETYKPHRFKDGPNGFTTYARKYTNLKGGYIVRYADDFKIMCRTYEEAQRFYHATVDFLKARLGLEINPEKSKVVHLKKNSSDFLGFKI

SEQ ID NO: 672 - protein, 275 aa, Bacillus thuringiensis
GTDGMTINDIKMLSTDEVIEKVKMMFGWYEPQSVRRVFIPKPNGNRRPLGIPTIWDRLFQQCVLQILEPICEAKFHNHSYGFRPNRSTHHALARMKSLVNRKGNGFHYCVDIDIKGFFDNVHHGKLLKQLWTIGIRDKKLLSIISRLLKAEIVNEGVPQKGTPQGGILSPLLSNIVLNELDWWVSNQWETIKTSHPYKGNSDKYRALKKSKLKECFLIRYADDAKILCRDYVTALKMFEATKDFLRTRLHLDISLEKSKIINLRKKASHFLGFTV

SEQ ID NO: 673 - protein, 285 aa, Clostridium botulinum
GTDGSTIKDINNIDIDEVITKIKTMFDFYTPKSIRRVEIPKANGKTRPLGIPTIWDRLFQQCILQVLEPICEAKFHKHSYGFRPNRSTHHAITRSVYLINITKLYHCVDVDIKGFFDNVNHGKLLKQLWALGVKDKKLLKIISVMLKAPIEGIGIPTKGVPQGGILSPLLSNIVLNELDWWVSNQWETFKTDKDYTKYRTSKTGKIVVDHSIRNKMLKKSKLKEIYIVRYADDFKIFCRTRSQAKAIDIAVGDMLKNRLGLECSAEKSKVLNLKKSYSEFLGFKM

SEQ ID NO: 674 - protein, 273 aa, Bacillus megaterium
GDDGLTIEDINRLSVSEVVSTIQRMFEYYTPQAVRRVFIPKANGKTRPLGIPTIWDRLFQQCILQVLEPICEAKFYKHSYGFRPNRNTHHAKARFETLINRACLYHCVDVDIKGFFDNVNHAKLIKQLWSLGIRDKALLSIISRLLKAEIIGEGFPKKGTPQGGILSPLLSNIVLNELDWWVSNQWESFETHKLYKSNLGRYNALKQSNLKHCYIVRYADDFKILCRTRSQAIKMYYAVNDFLHTRLRLEISEQKSKVVNLKKNSSEFLGFRS

SEQ ID NO: 675 - protein, 277 aa, Geobacillus kaustophilus
GTDGKTISDILTLNYDEAINFVKRCFKKYTPNPIRRVHIPKPGKKEKRPLGILTIADRIIQECVRMVIEPILEAQFFQHSYGFRPYRDAKQAIERCVFICNRIGYNWVIEGDIKGFFDNVNHTILIKQLWHMGIRDRRMLMIIKAMLKAGVIKETKINEMGTPQGGIISPLLANVYLHKLDQWITREWEEKKMRNGTTIRTAKYKSLRDHSTITKPEFYVRYADDWVLFTNSRGNAEKWKYRIKKYLKENLKLELSDDKTLITNIKKKPMKFLGFKI

SEQ ID NO: 676 - protein, 276 aa, Bacillus pseudofirmus
GTDGETIDDILQDGYESVISRVRKCFLAYNPKLLRRVHIDKQVSKDKRPLGIPAIIDRIIQECIRMIIEPILEAQFFSHSYGFRPYRSAEHALSKVTNTAYDTNYCWVVEGDIKKFFDNVNHTILIKKLYSMGIRDRRVLMIIKAMLQCGVLGEAEQTTVGTPQGGIISPLLANAYLDSLDHWITREWENKETKHEYSRLDGKYRALKNASNLKPAHFVRYADDWVLITNSKANAIKWKQRIAKHLKEQLKLELSEEKTLITNIKKKAIKFVGFHF

SEQ ID NO: 677 - protein, 274 aa, Bacillus cereus
GVDGKTIQDYLRLSEEKLIELIRGRLTNFKAHLIKRVFIPKANGGQRPLGIPTIEDRIIQQMMKQVLEPVLEAQFFKYSFGFRPERTTYHALERVKVLVHNTGYHWIVEGDIRQFFDKVNHRILIKKLWSMGIKDRRILCLITEFLKAGIFKNIIRNDNGTPQGGILSPLLANVYLHSFDKWVAKQFEEFTTRHEYSKHDHKLRGLKSSNLKPGYLIRYADDWVLVTNNKSHAYRWKTVIKNFLQKELKLELSEEKTRITNIRHKPIEFLGFKY

SEQ ID NO: 678 - protein, 276 aa, Bacillus thuringiensis
GVDSLTINDILQADEEKVIHLITNTIRDYTPSMVRRVWIPKAGKKELRPLGIPTILDRIIQQCVKQVIEPICEAQFFPYSFGFRPYRDGHMAIERVGSLIHKTKYHWIVEGDIRKFFDKVNHNILLKNCFKIGIQDKRVLMLIKAMLKAGVMHENTKTTLGTPQGGIISPILANIYLHDFDMWVYNQWQNKKTRKNYANKHSRTTTLKRTTKLKQGYLIRYADDWVIVTNSKTNAIKWKKAVSHYLKDKLKLELSEEKTKITNVRKKNIEFLGFKL

SEQ ID NO: 679 - protein, 290 aa, Geobacillus sp.
GIDQKIVDDYLLMPTEKVFGMIKAKLNDYKPIPVRRCNKPKGNAKSSKRKGNSPNEEGETRPLGISAVTDRIIQEMLRIVLEPIFEAQFYPHSYGFRPYRSTEHALAWMLKIINGSKLYWVVKGDIESYFDHINHKKLLNIMWNMGVRDKRVLCIVKKMLKAGQVIQGKFYPTAKGIPQGGIISPLLANVYLNSFDWMVGQEYEYHPNNANYREKKNALAALRNKGHHPVFYIRYADDWVILTDTKEYAEKIREQCKQYLACELHLTLSDEKTFIADIREQRVKFLGFCI

SEQ ID NO: 680 - protein, 277 aa, Bacillus pseudofirmus
GIDNKTIDYYLHLPYEDLVSQVQTCIEDYNPEPVRRKYIPKENSDKLRPLGIPTMIDRIIQEITRLVIEPIAEAKFYKFSYGFRPMRSAEHAMAEILEKARKSKTYWVIEGDIKGYFDNINHNKLITMLWKIGIKDKRVLSIIKKMLKSGIVEEDGEIYPSDLGSPQGGIISPLLANIYLNFFDWMIAEEFDQHHYINNYERRDKGLRAIRRDHKPVYSIRYADDWVVLCSSKKQADTLLIKIRKYLKHQLSLELSEEKTKITNLVEEKASFLGFEF

SEQ ID NO: 681 - protein, 276 aa, Bacillus cereus
GIDKKDVNYYLQMEAKQLIKLIRQHIDNYKPNPVRREYINKGNGKKRPLGIPTMIDRIIQEIARIVLEPIAEAKFFNHSYGFRPYRSCHYAIGRVLNTISRSKTYIAIEGDIKSFFDHINHNKLVEMMWNMGIKDKRFLIIIKKMLRAGVLEDKVILPTEIGTPQGGIISPLLANIYLNNFDWMVAKEFEEHRARYTVKHAFRSGLTKVGRRHKKCFLIRYADDWIILCEDTVQARILLTKIDKYYKHILKLELSKEKTFITDLREKPARFLGFDI

SEQ ID NO: 682 - protein, 286 aa, Bacillus cereus
GVDGTTINDYLQMDRKQLINLIQSQIDNYNPSTVRRTYIPKGNTGKLRPLGIPVIVDRIIQEIARMAIEPYCEAKFYPHSYGFRPYRSSEHAIARIVQNINSKAYIAIEGDIKGYFDNINHNKLLAILWEMGIKDKQFLFLIKKMLKSKILDNGNIISSDKGTPQGGIISPLLANVYLNNFDRMVSDLWESHSAVTTYAATRNGKTVEEKNYQFLRKKSVAKHYKTNLVRYADDWIILTETKEYAEKLLTKLRKYMKHQLSLELSEEKTVITDSREEPLHFLGFRI

SEQ ID NO: 683 - protein, 247 aa, Streptococcus agalactiae
GIDGVTIEQMDDYLHQNWRETKKLIKERSYKPQPVLRVEIPKPNGGVRNLGIPTAMDRMIQQAIVQVLSPLCEKHFSEYSYGFRPNRSCETAIVQLLEYLNDGYEWIVDIDLEKFFDTVPQDRLMSLVHNIIQDGDTESLIRKYFHSGVVINGQRHKTLVGTPQGGNLSPLLSNIMLNELDKGLEKRGLRFVRYADDCVITVGSEAAAKRVMHSVSSYIEKRLGLKVNMTKTKIVRPNKLKYLGFGF

SEQ ID NO: 684 - protein, 249 aa, Escherichia coli
GIDNMSIEEFNDFAKLHWLGIKQQLLNGSYQPLPVKRVMIPKPDGGERMLGIPAVIDRVIQQAIAQVISPYFEPQFSPHSYGYRPHKRASQAVNHVQSCVKQGYKTAVDIDLSKFFDEVDHDMLMNRVSRKIKDKALMRLLGKYLRAGIAERETGLWFESTKGVPQGGPLSPLLSNILLDELDKKLTYKHLKFARYADDIIILVKTKSEGLIIQREITAFITKRLKLKVNESKSRVGPVSGSKFLGFTF

SEQ ID NO: 685 - protein, 247 aa, Lactobacillus reuteri
GIDDMTVNDLLPYLRENKTELIASLREGKYKPAPVKRVEIPKPNGGVRKLGIPTVVDRMVQQAVAQILTPIFERVFSDNSFGFRPHRGAHDAIAKVVDLYNQGYRRVVDLDLKAYFDNVNHDLMIKYLQQYIDDPWTLRLIRKFLTSGVLDHGLFAKSEKGTPQGGPLSPILANIYLNELDKELTRRGHHFVRYADDCNIYVKSQRAGERVMRSITQFLEKRLKVKVNPDKTKVGSPLRLKFLGFSL

SEQ ID NO: 686 - protein, 247 aa, unidentified
  REGION 1..247: note = Description of Unknown: gamma proteobacterium HdN1 sequence
GIDGMPVEDLESHLRHHWPTLRQSLLDGTYQPKPVKRVEIPKGDGTKRALGIPTVIDRFVQQIIAQALSALWEPHFHPSSFGFRPARSAQQAVKYVQTLQREKYEWVVDLDLKSFFDEVNHDRLIARLKTRVEDKVLLRLINKFLHAGINANGILLRSEKGVPQGGPLSPILANIVLDELDWELEHRGHKFARYADDCNIMVKSKAAGERVMKSIRRFLETTLRLRVNDQKSAVDRPTKRNFLGFTF

SEQ ID NO: 687 - protein, 247 aa, Microscilla sp.
GVDGMQVKELRYWFSNNHQKLIEQLKEGNYRPMTIKGQEIPKPGGGVRQLGIPTVQDRLVQQAIAQQLSKRYDPTFSQYSYGFRKGRNAHQALRQAGAYVKEGFNYVVDLDLEKFFDKVNHDRLMWLLGRRISDKRVLKLIGKFLRSGILIGGLENQRISGTPQGSPLSPLLSNIVLDELDKELERRGHRFVRYADDMILLVRSQEAAERAYSSITSFIENRLLLKVNKDKSRICRPYQLNFLGHSI

SEQ ID NO: 688 - protein, 247 aa, Nitrosomonas europaea
GIDGVTTAEWPEHARAHWPATREQIEAGRYRPQPVRRVDIPKPDGGQRQLGIPTVTDRVIQQAIAQVLIPIFDPGFSASSFGFRPGRNAHQAIRQVQAHVKAGYRWAVDLDLARFFDNVNHDLLMSLLSRSIADKRLLALIGRYLRAGVLVGEHPQPSEVGTPQGGPLSPLLANVLLHQFDLELERRGHRFARYADDVIILVKSRRAAERVMQSLTYFLQSTLKLTVNLAKSQVAPMSECSFLGFTL

SEQ ID NO: 689 - protein, 247 aa, Geobacter sulfurreducens
GVDGVTIDAFPERFRPLWGDIRASLATGTYQPQPVLRVEIPKPTGGTRPLGIPTVLDRLIQQATAQVLTPIFDPEFSASSFGFRPGRSAHNAVRQLREYLRQGYRIAVDIDLAKFFDTVNHDLLMTMVGRRVRDKRVLTLIGRYLRAGVEVDGRLEKTRMGVPQGGPLSPLLANILLDHLDKELESRGHKFVRYADDFVILVKSERAGERVMGSVRKYLTNKLKLTVNEDKSKVARSGDLSFLGFVF

SEQ ID NO: 690 - protein, 248 aa, Shewanella baltica
GIDGMTIEAFPLWMQQGGWQRCKSLLERGEYNPSAVRRVEIDKPDGGKRKLGIPNVIDRVIQQAIAQILTPLFDPFFSANSFGFRPNRNAKQAVLQVRDIIKQKRKFAVDVDLSKFFDRVNHDLLMTQLRIKVQDKRLLALIGKYLRAGVTVNDQFEASFEGVPQGGPLSPLLSNIMLDSLDKELESRGHKFARYADDFIILVKSIRAGERVLKSITRYLATKLKLVVNEQKSQVVEVGQSKFLGFTF

SEQ ID NO: 691 - protein, 248 aa, Pseudomonas aeruginosa
GIDGMNIDEFPAWVRSGNWKALKQQLVTGCYQPSPVRRVEIAKPDGGTRQLGIPTVTDRVIQQAITQVLTPIFDPEFSEHSFGFRPGRNGQQAVKQVQSIIKEGRRFAVDVDLSKFFDRVNHDLLMTRLGDKVKDKRLLRLIKRYLRAGFIDNQFKGESRVGVPQGGPLSPLLANIMLDSLDKELEKRGHKFARYADDFTILVKSQRAGERVLRSISQYLQSRLKLVVNTDKSRVVKTNESQFLGFTF

SEQ ID NO: 692 - protein, 247 aa, Geotalea uraniireducens
GVDNMPVTALKGYLQEEWPRIREELLTGTYHPQPVRKVEIPKPGGGTRMLGIPTVLDRLIQQAVHQVLSPLFDPGFSISSHGFRPGRSAHQAIKAARKYVESGLRWVVDIDLEKFFDRVHHDTLMSLVKRKVGDRLVLSLIDSYLKAGILEGGVTSPRLEGTPQGGPLSPLLSNILLDELDKKLERRGHKFCRYADDANIYVATRRSGERVMASITGYLSERLKLTVNQGKSAVDRPWKRSFLSYSM

SEQ ID NO: 693 - protein, 247 aa, Pseudomonas alcaligenes
GADGMTVADLAGYVKQYWPTLKARLLAGEYHPQAVRAVEIPKPQGGTRQLGIPSVVDRLIQQALQQQLTPIFDPLFSDYSYGFRPGRSTHQAIEMARAHVTAGHRWCVELDLEKFFDRVNHDILMACIERRIKDKCVLRLIRRYLEAGIMSGGVVSPRQEGTPQGGPLSPLLSNILLDELDRELERRGHRFVRYADDANIYVRSPRAGERVLVSVERFLRERLKLTVNRKKSQVARAWKCDYLGYGM

SEQ ID NO: 694 - protein, 247 aa, Bacillus sp.
GVDEKDIEATRLYLRENGQEIIQLIREGKYKPQPVRRVEIPKANGGKRQLGIPTVTDRVIQQAVVQRLTPIFERQFSHFSYGFRPNKSAHQAIEQARQYIEEGYNFVVDMDLEKFFDRVQHDKLMSLIAKTISDKPTLKLIRRFLQAGVMVNGVVITNREGTPQGGPLSPLLSNIILNELDKELEKRGHKFVRYADDCNIYVKSIKAGERVKQGVTEFLERKLKLKVNEEKSAVGKPSARTFLGVSF

SEQ ID NO: 695 - protein, 248 aa, Clostridium acetobutylicum
CGVDGMKVDELLQYLKQNGKTLIASIFNGKYCPKAVRRVEIPKPDGGIRLLGIPTVVDRTIQQAISQVLTPIFEKTFSENSYGFRPKRSAKQAIKKAKEYMEEGYKWVVDIDLAKYFDTVNHDKLMALVARKIKDKRVLKLIRLYLQSGVMINGVVSETERGCPQGGPLSPLLSNIMLTELDRELEKRGHKFCRYADDNNVYVRSKKAGDRVMRSITRFIENKLKLKVNKEKSAVDRPWRRKFLGFTF

SEQ ID NO: 696 - protein, 247 aa, Bacillus halodurans
GVDEMDVKSLRLHLHENWTSIRNEIIEGSYFPKPVRRVEIPKPNGGVRKLGIPTVMDRFLQQAIAQILTQLYDPTFSERSFGFRPHRRGHNAVRQAKQWMKEGYRWVVDIDLEKFFDKVNHDRLMRKLSSRIQDPRVLQLIRRYLQTGVMERGLVSPNTEGTPQGGPLSPLLSNIVLDELDNELEKRGLKFVRYADDCNIYVRSKRAGLRIMESVTSFIENRLKLKVNREKSAVDRPWNRKFLGFSF

SEQ ID NO: 697 - protein, 247 aa, Oceanobacillus iheyensis
GIDEMSVKFLRRHLYDNWDSLRENLRKGTYTPSPVRRVEIPKPSGGVRMLGIPTVTDRFIQQAIAQVLHTIFDPSFSEHSYGFRPNRRGHDAVRKARGFIKEGYRWVIDMDLEKFFDKVNHDKLMGVLAKRIKDKELLRLIRKYLQSGVMINGIVVSSEEGTPQGGPLSPLLSNIILDDLDKELEERGLRFVRYADDCNIYVRTKKAGNRVMNSITTFIEEKLRLKVNKEKSAVDRPWKRKFLGFSF

SEQ ID NO: 698 - protein, 246 aa, Pseudomonas syringae
GVDGLGIVETAEHLKTAWPGIRAQLLAGTYRPDPVRRVLIPKPGGGERKLGIPTVTDRLIQQALLQVLQPLLDPDFSNHSYGFRPERSAHQAVLAAQQYIHSGRQIVVDVDLEQFFDCVEHDVLIARLGRKVKDRDVLRLIRAYLNSGALIEGMVMTSTRGTPQGGPLSPLLANVVLDEVDKELERRGHCFVRYADDANVYVRSPKAGQRVMALLRRLYGRLGLRVNESKSAVASAFGRKFLGFSF

SEQ ID NO: 699 - protein, 246 aa, Burkholderia fungorum
GVDGLDIGQTARHLVTAWPVIREQLLKGTYRPDPVRRVTIPKPDGGERELGIPTVTDRLIQQALLQVLQPILDPTFSEHSYGFRPGRRAHDAVLAAQSYVQSGRRIVVDVDLEKFFDRVNHDILIDRLKRRIDDAGVIRLVRTYLNSGIMDDGVVQQRDQGTPQGGPLSPLLANVLLDEVDKELERRGHCFARYADDANVYVRSRRAGERVMALLRRLYGRLRLKVNETKSAVASVFGRKFLGYSL

SEQ ID NO: 700 - protein, 247 aa, Variovorax paradoxus
GVDGRTVQQTGEDLKTQWPDIRRGLLDGTYRPSPVRRVGIPKLGGGTRELGIPTVVDRLIQQALLQVLQPLIDPTFSEHSYGFRPGRSAHQAVQAARQYVEQGRRVVVDVDLGKFFDRVNHDILMDRLGKRIADKAVLRLIRHYLNAGIMAHGVMQMRVEGTPQGGPLSPPLLANVLLDEVDRALERRGRKFVRYADDCNVYVKSERAGQRVLDGVRACYAKLRLKVNETKTAVATAWGRKFLGYCL

SEQ ID NO: 701 - protein, 246 aa, Polaromonas sp.
GVDGLTIEETPEYLKTHWSRIRLELLNGTYRPQAVRRVEIPKPTGGMRELGIPTVLDRLIQQALLQVLQPMIDLTFSEFSYGFRPGRSAHDAVLQAQRYVQEGFQVVVDVDLEKFFDRVNHDILMDRLAKRIADKAVLRLIRQYLQAGIMAGGVVMDRSEGTPQGGPLSPLLANVLLDEVDLDLQRRGHRFARYADDCNVYVRSQKAGERVLLSLRKLYEKLHLKVNEKKTEVGPVFGRKFLGYCL

SEQ ID NO: 702 - protein, 247 aa, Serratia sp.
GVDKLTVQELKPWLKQHWLSVKGTLIAGSYLPRAIRKVDIPKPNGDVRTLGIPTVVDRLIQQAIAQTLSPYVEPSFSNSSYGFRPNRNAWQAVRQAQQYIQSGKRWVVDMDLEKFFDRVDHDILMSRLARTIKDKRLLKLIRRYLEADMVEGKEVIKRDKGMPQGGPLSPLLSNILLDELDKELERRGHSFCRYADDCNIYVSSQKAGKHAQKDISEFLMNTLKLQVNVRKSAVARPWERKFLGYSF

SEQ ID NO: 703 - protein, 247 aa, Serratia sp.
GVDNLSVGELKGWLKQHWASVREALLQGNYVPQAIRQVEIPKPDGGVRILGIPTVVDRLIQQAIQQHLTPDYEPEFSDSSYGFRPGRNAGQAVQQAQSYMQSGRRWVVDLDLEKFFDRVNHDILMARLSWKIKDTRLLKLIRRYLEADRVAGSEITRRREGMPQGSPLSPLLSNILLTDLDRELERRGHKFCRYADDGNIYVCSRQAGEHAMKEISHYLENKLRLKVNAHKSAVDRPWKRKFLGYSV

SEQ ID NO: 704 - protein, 247 aa, Cupriavidus taiwanensis
GVDALEVTALRDWLKVSWPSVRAALLGGQYIPQSVRAVDIPKPSGGVRTLGIPTVVDRLIQQALLQVLQPLYEPGFSESSYGFRPRRSAQQAVLQAQRYVQEGRRWVVDIDLEKFFDRVNHDILMSRVARQVKDVRVLKLIRRYLEAGLMRGGVVEARRQGTPQGGPLSPLLSNILLTDWDRELEKRGLAFCRYADDCNIYVRSQAAGQRLLAGMMTFLAERLNLQVNEAKSACARPWARKFLGYSL

SEQ ID NO: 705 - protein, 247 aa, Dickeya zeae
GVEGMSVSELPDYLKHHWPELKAQLLSGSYCPSPVRRVTIPKPGGGERLLGIPTVVDRFVQQATMQVLQRQWDASFSDSSYGFRPGRSAHQAVKQAQGYIGSGHHWVVDLDLEKFFDRVNHDVLMSRVAKRVSDKRVLSLIRGFLNAGVMEAGLVSPVTEGMPQGGPLSPLLSNLLLDDFDKELEKRGLKFARYADDCNIYVKSERAGNRVMEGLTHWLSRKLKLKVNAKKSAVAHPAMRKFLGYSF

SEQ ID NO: 706 - protein, 249 aa, Burkholderia vietnamiensis
CGVDGMTVQALPAFLREQWPSIRATLLNGTYKPQPVRRVEIPKPDGGGVRKLGIPCALDRFVQQAVLQVLQRQWDPTFSEASYGFRPGRSAHQAVAKAQSYIQSGYRWVVDLDLEKFFDRVNHDILMSRVARRVSDRRVLKLIRSFLTAGVMEHGLVGATDEGTPQGGPLSPLLSNLMLDDLDRELGRRGLRFVRYADDCNVYVRSERAGQRVMVGLKAFLTGKLKLKVNEAKSAVARPHTRKFLGFSF

SEQ ID NO: 707 - protein, 247 aa, unidentified
  REGION 1..247: note = Description of Unknown: Solibacter usitatus sequence
GVDGMTVIGIKDYLKQHWPAIRGQLLSGTYEPKPVRRVEIAKPDGGVRKLGIPTVLDRFIQQAVMQVLQRRWDRTFSDYSYGFRPGRSAQQAVAQAQQYIAEGHGWCVDLDLEKFFDRVNHDKLMGQIAKRIADKRLLKLIRAFLNAGVMENGLVSPSVEGTPQGGPLSPLLSNLVLDEFDRELERRGHRFVRYADDCNIYVRSERAGQRVMESITQFITQKLKLKVNETKSAVARPQERKFLGFSF

SEQ ID NO: 708 - protein, 247 aa, Bradyrhizobium sp.
GVDGMTVDDLPTYLKANWLTIRAQLLDGTYKPQAVRRVEIPKASGGVRLLGIPTVVDRFIQQAVLQVLQGEWDRTFSDASYGFRPGRSAHQAVTKAQAYIASRHRIVVDIDLEKFFDRVNHDILMGLVAKRVADKRLLKLIRGFLTAGVLEGGLVSPTEEGAPQGGPLSPLLSNLMLDVLDKELERRGHRFVRYADDCNIYVRSRKAGERVMASIETFLERCLKLKVNRAKSAVARPNHRKFLGFSF

SEQ ID NO: 709 - protein, 248 aa, Myxococcus xanthus
GQDGITFEHIEERGRAGFLGAVAEELRTGTYRPRPYRRREIPKEGGKVRVISIPSIRDRVVQGALRLVLEPIFEADFSGSSFGARPGRSAHEAIDTVRQGLRRRRHRVVDVDLKAYFDSIRHAPLLERVARRVQDGEVLALVKQFLRSTGDRGIPQGSPLSPLLANIALNDLDHVLDRGRGFLTYARYLDDMVVLAPDSEKGRRWAARALERIRQEAEALGVSLNKEKTRTVTMTDRNASFAFLGFDF

SEQ ID NO: 710 - protein, 255 aa, Cupriavidus necator
GIDDLSFEDIEASGRIVFLAEIQADLKTGRYEPKPNRRVEIPKSNGKVRVLQVPCIRDRVVQGALKLILEAVFEADFCPNSYGFRPKRSPHRALAEVRRSVLRRMSTVVDVDLSRYFDTIQHSTLLGKIAKRIQDPQVMHLVKQVIKAAGKVGVPQGGPFSPLAANIYLTEIDWMLDEIRRKTAQGPYEAVNYHRFADDIVITVSGHHTKRGWAERALLRLREQLVPLGVELNTEKTTVVDTLHGEAFGFLGFDL

SEQ ID NO: 711 - protein, 255 aa, Bacillus thuringiensis
GIDGKSFADIELEGVIPFLTGIQEELQAGIYQPQANRKVEIPKTNGKMRTLQIPCIRDRVVQGALKLILEAIFEADFCPNSYGFRPKRSPHQALAEVRRSILRRMTIIIDVDLSRYFDTIRHNILLEKIAKRVQDPQVMHLVKQVIKATGKIGVPQGGPFSPLAANIYLNEVDWTFDTIRRKTADGNYEAVNYHRFADDIVIAVSGHSSKSGWAELALRRLWEQLKPLGVELNLEKTQMVNVLKGESFGFLGFDL

SEQ ID NO: 712 - protein, 255 aa, Wolbachia endosymbiont
GIDGVTFESIETEGSRKYLQRIRHELITKTYSPNRNRRKEIPKSGEKFRTLNIPCIRDRIVQTALKLILEPIFESDFQKGSYGYRPKRNAHEAVQKVTEAAIKGNTKVIDVDLKSYFDSVRHHILMEKIAKRINDKEIMRMIKLILKIGGKRGMAQGSPLSPLLSNIYLNEVDKMLEKAKEVTKEGKYQRMEYARWADDLVILIREYPKREWLERAVYRRLEEELAKLEVRVNEEKTKVINLKKGETFSFLGFDF

SEQ ID NO: 713 - protein, 256 aa, Acetohalobium arabaticum
GVDGITFEDIEGIGVLKYLKKIREELVNETYKPQENRKQEIPKGNGKVRVLGIPTIKDRIVQGALKLILEPIFEADFQESSYGYRPKRTAHQAVKKIEKAIVSGKRKVIDLDLSSYFDTVKHHILLAKIAKRVIDKEVMHLIKLMLKASGKEGVPQGGVISPLFANLYLNEVDRMLERAKEVTKSKGKYTELEYARFADDIVIAVSSHPSMNWLLSKVIQRLKEELDKIKVKVNKEKTKVVNLEKGERISFLGFTL

SEQ ID NO: 714 - protein, 255 aa, Magnetococcus sp.
GIDGVTFEAIEESGVEQFLGEVRKELVSGSYRPLKNRRKAIPKGDGKERVLGIPSIRDRVVQGALKLILEPIFEADFQSGSYGYRPKRMAHQAVNRVAIAIAQGKTQVIDADLKSYFDTVQHDLALRKVSERVDDDQVMHLLKLIFKTSGKRGVPQGGVISPLISNLYLNEVDKMLERAKEVTRKGKYTHIEYARFADDLVILVDGHHRWNGLARKVYQRLGEELAKLKVQLNLEKTRVVDLTRGEDFTFLGFNI

SEQ ID NO: 715 - protein, 255 aa, Desulfofarcimen acetoxidans
GIDGITFDNIEASGIEIFLQQIQKELISGTYWPTQNRRKEIPKGDGKYRILGIPTIRDRVVQGALKLILEPIFEADFQEGSYGYRPKRNPHQAIDRVAKAVVENKTRVIDLDLRSYFDTVRHDLLLKKVAKRVNDENVMRLLKLILKASGKRGVPQGGVISPLLANLYLNEVDKMLEKAKEVTRHEQYTHIEYARFADDIVILIDAYPKWNWLEKAVYQRLLEELTKLDVQLNEEKTRIVNLANGESFGFLGFDF

SEQ ID NO: 716 - protein, 253 aa, Rhodococcus sp.
GIDRITLEEVEEYGVARLLDELAVELKEGSYRPLPARRVFIPKPGTVEQRPLSIPSVRDRIVQAAWKLVAEPVFEADFLPCSFGFRPRRGAHDALQVLIDESWRGCRWVVETDIANCFEAIPIEKLMQAVEERVCDQPFLKLLRVMLRAGVMEEGQVRRPVTGTPQGGVASALLCNVYLHRLDRAWDVDEHGVLVRYADDALVMCRSRRQAEAALTRLRELLADLGLEPKEAKTRIVHLRVGGEGVDFLGFHH

SEQ ID NO: 717 - protein, 263 aa, unidentified
  REGION 1..263: note = Description of Unknown: uncultured marine bacterium sequence
GVDHVSMEAIASNPRKYLYPLWNRLSSGSYFPPPVKLVPIPKGDGKERMLGIPTIIDRVAQEVIKAELEVIVEPRFHPSSFGYRPHKSAHEALEQCAKNSWERWYVVDLDIKGFFDNIDHEKMMGILRKHTNKKHILLYCDRWLKTPMQDRVGGVQARMKGTPQGGVISPLLANLYLHEAFDQWISTTQPRIVFERYADDIVIHTRSMEQSHFILDKLKARLKSYSLELHPDKTKIVYCYRTARFHKEGKEIPVSFDFLGFTF

SEQ ID NO: 718 - protein, 260 aa, Serratia odorifera
GVDGMTIEAFEHNLARNLYKIWNRLSSGCYMPPPVKRVEIPKSDGKTRPLGIPTVSDRVAQMAVKMILEPQWDPLFSDSSFGYRPGKSAHDAVAQAKANCWKYEWVIDLDIRGFFDNLDHALLLKAVDHLHPAPWVRLCIVRWLKAEIIFPDGHRHSPEKGTPQGGVISPLLANLFLHYTQDKWLEKHYPNNSWERYADDSIIHCRSRREAGLLLSQLRERMKACGLELHPEKTRIVNCHPLTRRKNDGHYSFDFLGFTF

SEQ ID NO: 719 - protein, 259 aa, Cellvibrio sp.
GADNVCIDMFEHNLENELYKLWNRMSSGSYMAPPVKRVEMAKADGKLRPLGIPTVADRVAQMVVKMTLEPEWDSKFHASSFGYRPRRSAHHAVQAAKINCWKYSWVIDLDIKGFFDNLNHDQLQKFVAQATDDPWCKLYIKRWITAGVQMPGGELHKTAKGTPQGGVISPLLANLYLHKVFDSWMQKYFPQNPFERYADDIVCHCRTEHEAEQLLSAISRRMQRFDLTLHPEKTKIVYCGRRKIERTKAQSFDFLGFTF

SEQ ID NO: 720 - protein, 262 aa, Frankia sp.
GPDGVTVEQFEANVKDRLYVLWNRMSSGSYFPGPVGAVEIPKKGVKGGARTLGIPNVVDRVAQTVLKLALEPKVEPVFHRDSYGYRPGRSQRQALEVCRKRCWSHDWVVDLDVRKFFDTVPWEKLLKAVAYHTDQKWVLMYVERCLKAPTKHADGTLQERTMGTVQGGPFSPLAANIYLHWGLDAWMAREFPTVPFERWADDVVFHCVSLEQAREVRDAVVARLVEVGLEAHPDKTRIVYCKDSNRGGDYENTSFTFLSYTF

SEQ ID NO: 721 - protein, 261 aa, Zunongwangia sp.
GIDTVSIEQFDESLSKNLYKLWNRMASGSYFPPAVKEVEIPKKDGKVRKLGIPTISDRIGQMVVKMYLEPRLENVFNPNSYGYRPNKSAHQALEQVRKNCWKMDWVIDLDIKGFFDNIDHHKMMLAIEKHVPERWVRLYIARWLASPVMTKSGNLVSNQGRGTPQGGVISPLLANLFLHYGLDKWLEQNDNTVKFTRYADDVIVNCKSQKHAEQTLEAIKSRMHQIGLELHPEKTKIVYCRDYRRQEKYSNVKFDFLGYSY

SEQ ID NO: 722 - protein, 260 aa, Leadbetterella byssophila
GIDTQSLEQFEERLADNLYKIWNRMTSGSYHPKAVREVQIPKKSGGYRGLGIPTVSDRVAQQVVKSYLEPKVEPSFHQDSYGYRPNKSAHDALAKTVRNCGYYSWVVDLDIRGFFDNIDHELLMKAVRVYTDEKWIIMYIERWLEVGVVREGKVHKREKGTPQGGVISPLLANIFLHFVFDKWMEKHHGNMPFERYCDDAIIHCTTWNQAVFIKNAVTKRMKECKLELNSEKTKIVYCKNSIHRESNPVPVSFTFLGHTF

SEQ ID NO: 723 - protein, 260 aa, Bacteroides thetaiotaomicron
GIDKVTLEDYEKNLRGNLYKLWNRMSSGSYFPPSVKLVEIPKSTGGKRPLGIPTVSDRVAQMAVVMLITPSIEPCFHEDSYAYRPHRSAHDAVGKARERCWKYAWVLDMDISKFFDTIDHELLLKALKRHTQEKWVLMYIERWLKVPYEKSDGSQVDRALGVPQGSVIGPVLANLFLHYTFDKWMEKNFPRVPFERYADDTICHCHSLKQAEYMQAMIQQRFECCRLRLNEEKTKIVYCKSSRQKECYPNVTFDFLGFTF

SEQ ID NO: 724 - protein, 261 aa, Frankia sp.
GVDGVGLAGFESDLKGNLYRIWNRMSSGSYFPPPVKAVEISKEHGAGTRMLGVPTIGDRIAQTVVAARLEGVVEPKFHPDSYGYRPRKGSLDAVRKCRERCWKYDWVIDLDVRKFFDTVPWDRIIAAVEANTALPWVLLYVKRWLAAPVRMPDGTLAERDRGTPQGSAVSPVLANLFMHYAFDLWMVREFPACPFERYADDAVVHCKSLAQARFVLDRLRKRMEQVGVSLHPEKTRIVYCKDGKRRGSHEHTEFTFLGFTF

SEQ ID NO: 725 - protein, 261 aa, Frankia sp.
GVDGQSIDAFEKDLKNNLYRIWNRMSSGSYFPPPVRAVEIPKAHGGGVRVLGVPTVADRVAQTVVAMTLEPRMEQVFHDGSYGYRVGRSALDAVGACRQRCWQRDWVVDLDIQDFFGSCPHDLIVRAVEVNTDQPWVVLYVRRWLTAPVCYPDGSLVTPDRGTPQGSAVSPVLANVFLHYALDLWLAREFPGLPFERYVDDAVVHCATRRQAEQVRTAIGRRLEEVGLRCHPAKTKVVYCKDSGRRGSHEHTSFTFLGYTF

SEQ ID NO: 726 - protein, 260 aa, Magnetococcus sp.
GLDGLTMEAFEEDLKNQLYRLWNRMSSGSYFPPPVMRVEIPKSDGGVRGLGIPTIGDRIAQAVVKRYLEPLVEPKFHEDSYGYRPNRSALDAVRQARQRCWRDDWVLDLDISKFFDKLDHALVMRAVKRFTDCKWVLLYIERWLKADVQLQDETILHREMGTPQGGVISPLLANIFLHLGFDQWMKENYPHIHFERYADDIVVHCRSLKQLQWIKKRIEQRLKLCKLSLNDKKTRVVYCKDSRRSGEWTCQSFDFLGYTF

SEQ ID NO: 727 - protein, 260 aa, Ruminococcus sp.
GADEQTIKEFEEHLNNNLYKLWNRMASGSYFPKPVRAVAIPKKNGGIRILGIPTVEDRIAQMVAKMYFEPLVEPMFYNDSYGYRPNKSAIQAVGQARERCFKRDWALELDIKGLFDNIKHGYLMYMVEKHTQIKWLILYIKRWLTVPFIMSDGSVAERRSGTPQGGVISPVLANLFLHYVFDDFMTKAYPNIWWERYADDGVLHCQSYKQAAFIKQKLEERFQQFGLELNKEKTRIVYCKDNRRPQNYSCTQFTFLGYTF

SEQ ID NO: 728 - protein, 260 aa, Bradyrhizobium japonicum
GVDGQSLEDFAGDLENHRYRLWNRLVSGSYFPPPVRRVEIPKAGGGIRPLGIPTVADRIAQMVVKRCLEPVLDGEFDPDSYGYRPGKSAHQAIEQARKRCWQHDWVVDLDNKSFFDTIDHELLMRAVYRHTKADWIRLYIERWLKAPVEMPDGSVRARTTGRSQGGVVSPILANLFLHYVFDVWMKGSYPHIPFERYADDIICHCRTRQEAEELKSALERRFADCHLLLHPEKTKVVYCADSNRRRSYPQIHFDFLGFSF

SEQ ID NO: 729 - protein, 260 aa, Paracoccus denitrificans
GVDGQTLESFGERLGPNLYKLWNRMSSGSYMPSSVRRVMIPKADGGQRPLGIPTVTDRIAQEVVRLYLEPLVEPVFHRDSYGYRPERSAIDAIRKARQRCWRYDWVLDMDIKGFFDTIDHELLLKAVRHHTDCRWVLLYIERWLKAPVRMEDGSLVPQERGTPQGGVISPLLANLFLHYAFDRWLDRENPQVPFERYADDIICHCRTEDEARRLWQQVENRLAGCGLTLHPQKTKIVYCKDTNRKGSFPTVAFDFLGYRF

SEQ ID NO: 730 - protein, 260 aa, Ralstonia solanacearum
GVDGQSIEEFEQDLSGNLYKLWNRLASGSYMPPAVRCVEIPKATGGTRPLGIPTVADRIGQMVVKDALEPILEPCFHHDSYGYRPNKSAHDALAVARQRCWRAAWVLDVDIKGFFDNIDHALLMKAVRKHIDCRWITLYIERWLTAPVQLPDGTSQARNKGTPQGGVISPLLANLFLHYVFDMWMVRNFPANGFERYADDVVIHSTSLKQVTMLRAQLTERLADCKLEMSPGKTKIVYCKDKRRKGGYPEISFDFLGYTF

SEQ ID NO: 731 - protein, 260 aa, Halanaerobium praevalens
GIDKISIEKYEKNLKNNLYKLWNRMASGTYFPKAVKAVEIPKKNGGIRVLGVPTVEDRIAQMIVKLSMEKIIDPIFLNDSYGYRPNRSAHDAIKVTRSRCWKYDWVLEFDIKGLFDNINHKLLLKAVYKYAKYKWEILYIKRWLANPVSNNNKITKNTENGTPQGGVISPLLANLFLHFAFDKWMEKRFPNNKWCRYADDGIIHCNSRAEAIFILNCLKERMKECKLEIHPGKTKIIYCKDSNRKENNKLHEFTFLGYSF

SEQ ID NO: 732 - protein, 260 aa, Alkaliphilus metalliredigens
GIDEVTLQEYENNLEDNLYKLWNSMSSGSYFPQAVRGVEIPKKNGGVRVLGVPSIDDRIAQNVMVSELNPKVEPIFYEDSYGYRENKSAIDAIEVTRKRCWEYDWLIEFDIVGLFDNINHDLLMKAVKQHTNEKWVILYIERTLKVPMVMSDGIHVERTKGTPQGGVISAVLANLFMHYAFDHWMTRKHSNNPWVRYADDGLIHSHSLKEAEVLLLKLGERFKDCHLEIHPNKTKIIYCKDDNRKQNHIHTNFDFLGYTF

SEQ ID NO: 733 - protein, 260 aa, Chlorobium phaeobacteroides
GVDQESIEAFEKNLKGNLYKLWNRLSSGSYFPPPVKGVGIPKKTGGIRMLGVPTVADRVAQTVGKETLEPLLEPIFHQDSYGYRPGRSALDAVGVVRERCWKYDWVVEFDISKFFDTMNHELLMRAVRKHCQIEWVLLYVERWLKAPMMSPEGDLVERTKGTPQGGVISPLLANLFLHYAFDRWVSENLPGVPFCRYADDGVLHCKSKEQAVLVMKKITKRFEACGLRVNPDKTRIVYCKDDKRKEDHPVTSFTFLGYTF

SEQ ID NO: 734 - protein, 260 aa, Pelodictyon phaeoclathratiforme
GVDRESLQAFETKLKDNLYKVWNRLSSGSYFPPPVRGVGIPKKSGGVRMLGVPTVADRVAQSVVKMVLEPILEPVFHEDSYGYRPGRSAHDAIAVVRKRNWEYDWVVEFDIKGLFDNIDHELLMRALRKHCQTPWVFLYVERWLKAPMETPEGELIERTKGTPQGGVVSPLLANLFLHYAFDRWVSENLPGVPFCRYSDDGVLHCKSKIQAELVKRKIGERFRECGLELHPDKTQIVYCRDSNRKDEHPVNQFTFLGFTF

SEQ ID NO: 735 - protein, 260 aa, Pseudomonas putida
GIDDETIADFERNLPKNLYKLWNRMSSGSYFPPPVKAVEIPKASGGIRRLGVPTVSDRIAQTVVKLLIEPKLDALFHPDSYGYRPGRSAKQAIAITRERCWRYDWVVEFDIKAAFDHIDHELLMKAVRTHIKEDWILLYIERWLVAPFEAADGVRIQRERGTPQGGVISPMLMNLFMHYAFDAWMQRNSPNCPFARYADDAVVHCRSQRQAEHVMRSIASRLAVCGLTMHPEKSKIVYCKDSNRRAGYPHVSFTFLGFTF

SEQ ID NO: 736 - protein, 272 aa, Vibrio vulnificus
GVDGVTIEDFEKDLKNNLYKIWNRMSSGSYFPTPVAAVSIPKKSGGERVLGIPTVSDRVAQTVVRDKLEIMLEHHFLDDSYGYRVGKSAHDAIEVTRRRCWQYDWVLEFDIKGLFDNIRHDLLMKAVKKHVQLAEESQSRDYQWITLYIERWLVAPLQKADGTQTERELGTPQGGVVSPVLANLFLHYVFDKWLEKNYPDNPWCRYADDGLVHARTKPKAEKLRDELAKRFKECGLEMHPIKTKIVYCKDDIRRGSGKHIEHKQFDFLGYTF

SEQ ID NO: 737 - protein, 260 aa, Methylocystis sp.
GVDGVTIEQFEKDLKGNLYKIWNRMSSGAYFPPPVRAVSIPKKSGGQRILGVPTVADRVAQTVVKEIIEPALDAIFLADSYGYRPDKSALDAVGVTRERCWKFDWVLEFDIKGLFDNIDHTLLMRAVRKHVACPWALLYIERWLTAPMMQEDGTLIERTRGTPQGGVVSPVLANLFMHYTFDLWMARTFPHLRWCRYADDGLVHCRSEREARIVWEALASRMAECRLELHPTKTKIVYCKDDRRKANFENVAFDFLGYCF

SEQ ID NO: 738 - protein, 259 aa, Sinorhizobium meliloti
GVDGQTLEIFEKDLAANLYKIWNRMSSGTYFPPPVRAVSIPKKAGGERVLGVPTVSDRIAQMVVKQMIEPDLDSLFLPDSYGYRPGKSALDAVGVTRQRCWKYDWVLEFDIKGLFDNLPHDLLLKAVRKDVKCNWALLYIERWLTAPMEKNGEVIERSRGTPQGGVVSPILANLFLHYAFDLWMTRTHPDLPWCRYADDGLVHCQSEQQAEALRVELSSRLAACGLQMHPTKTKIVYCKDQRRREAYPNVTFDFLGYQF

SEQ ID NO: 739 - protein, 259 aa, Sinorhizobium meliloti
GVDGQTIEQFEADLKGNLYKIWNRMSSGSYFPPPVRAVPIPKKTGGQRILGVPTVSDRIAQMVVKQLIEPELDQIFLKDSYGYRPNKSALDAVGITRQRCWKYDWVLEFDIKGLFDNISHELLLKAVRKHVKCKWALLYIERWLTAPMEQDEQRIERDCGTPQGGVISPILSNLFLHYAFDLWMDRTHPDLPWCRYADDGLVHCRSEQEAEAVKAALQARLAECQLEMHPTKTKIVYCRDSKRRGQHPNVTFDFLGYCF

SEQ ID NO: 740 - protein, 260 aa, Escherichia coli
GIDKQSLADFDKRLVDNLYKIWNRLSSGSYFPPAVKAVAIPKKLGGERILGIPTVSDRIAQTVVKLAFEPQVEPHFLADSYGYRPNKSALDAIGVTRKRCWYYDWVLEFDIKGLFDNIPHELIMKAVDKHNPARWVKLYIQRWLTAPMVMSDGEVRARTMGTPQGGVISPLLANLFMHYVFDKWLAKYYPKVPWYRYADDGILHCHSEAEATEMREVLRKRFSECGLEMHPEKTRVIYCKDGSRKGDYEHTMFDFLGYTF

SEQ ID NO: 741 - protein, 260 aa, Methanosarcina acetivorans
GVDDENIAAFESDLTNNLYKIWNRMSSGCYFPPSVKAIEIPKKSGGTRILGIPTVLDRVAQMVTKIYLEPQLEPLFHPDSYGYRPGKSAADALAATRKRCWRYNWLLEFDIKGLFDNINHDLLMKQVSMHTDKPWIILYIQRWLKAPFQMADGTVNERTKGTPQGGVVSPLLANLFLHYAFDQWMDSHHRYNPFERYADDSVIHCRSREEAERLWIELDKRLSEFGLELHPSKTRIVYCKDDDRQGDYPETKFDFLGYTF

SEQ ID NO: 742 - protein, 259 aa, Bacillus pseudofirmus
GIDEQSIDEFERNLKDNLYKVWNRMSSGSYIPPAVKAVEIPKKAGGIRTLGIPTVADRIAQMTVKLYFEPLVEPFFHEDSYGYRPKKSAIQAIETTRKRCWKYNWVLEFDIKGLFDNIDHELLMRAVDKHTDIEWVKLYIKRWLTAPFQTKEGIKERTSGTPQGGVISPVLANLFLHYAFDKWMAINHPRNPFARYADDAVIHCKTEEEAKRVLESLNQRMNECKLELHPSKTKIVYCKDADRREDHKNITFDFLGYTF

SEQ ID NO: 743 - protein, 260 aa, Mesotoga prima
GIDEVSLEEFEADLDNNLYKIWNRMTSGSYFPPPVKAIEIEKKSGGKRVLGIPTVGDRVAQMVAKIYLNPLVDPYFHKDSYGYREGKSAIDALEVTRQRCWRYDWVLEFDIKGLFDNIDHELLMRAVKKHVKIPWLILYIERWLKAPFIQANGRVEERSKGTPQGGVISPVLANLFMHYAFDKWMERTHPDKPFARYADDGVIHCRTLEEARLLLESLKERMEECKLKLHPEKTRIVYCKDDKRKGEYPNTSFDFLGYTF

SEQ ID NO: 744 - protein, 250 aa, Alkaliphilus oremlandii
CGIDGETVFNFHLNLELNIEFLHDKLKTNGYEPSPVRRVEIQKPDGGVRLLGIPTVKDRVVQQAIVNIIEPIFDKTFHPSSYGYRPNHSQHGAVAKAERFMNKYGLEHVVDMDLSKCFDTLDHEIMMKAVSERISDGRVLKLIEKFLKAGVMHSDNFSRTEVGSPQGGVISPLLSNIYLNQFDQRMMSKGIRIVRFADDILIFAKDKKTAGNYKAYATQVLENELKLKVNNEKTKLTNVNEGVEFLGFVI

SEQ ID NO: 745 - protein, 249 aa, Desulfotalea psychrophila
GIDGQSVKDFAESLDVNLDRLLTELREKSYQPQPVRRVEIPKENGGIRLLGIPAVRDRVVQQALLDILQPIFDPDFHPSSYGYRPGRSCHQAITKATMFIRKYDRKWVVDMDLSKCFDTLDHDLILSSLSRRIKDGSILGLLKKILKSGVMTDEGWQASEVGSPQGGVISPLIANIYLDQFDQFMKKRGHRIVRYADDILILCSSKSAAKNALLQASCFLEKGLLLTVNREKTHICHSWSGVAFLGVSI

SEQ ID NO: 746 - protein, 273 aa, Intrasporangium calvum
GVDGVTVRQIRQRGEVGVFLAGIAASLRDGTYRPAPVRRVLIPKPGGKSRPLGIPTVTDRVVQQSLRMVLEPIFEADFLPVSYGFRPKRRAHDAVAEIHFYAGRGYRWVLDADIEGCFDHIDHTALLGLVRERIKDKKTVALVRAFLKAGVLSDLGLEAAAGEGTPQGGIISPLLANIALSVLDEAIMAPWAQGGDQSTQTGRAKRRYHGLGNWRIVRYADDFVIMTNGSRDDVLALKEQAAEVLARVGLRLSESKTRVTHLSEGIDFLGFHI

SEQ ID NO: 747 - protein, 273 aa, Frankia sp.
GVDGRTAASIVARIGIPEYLDGLRSALKDRSFRPLPVRERMIPKAGGKLRRLGIATITDRVVQASLKLALEPIFEADFLPCSYGFRPMRRAHDAVAEIRYLTSKPRCYEWIVEGDIKACFDEISHTSLTGRVRARIGDRRVLALVKAFLKSGILVEDRLVRPTTAGTPQGSILSPLLSNVALSVLDEHVARSPGGPGTGKTEKAKRLRHGLPNFKLVRYADDWCLVIKGTKADAEALREEIAGVLSTMGLRLSREKTLITHIDDGLDFLGWRI

SEQ ID NO: 748 - protein, 270 aa, Catenulispora acidiphila
GIDGRTVSRIEGQGVEEFLAGLRESLKSGEFWPVPVKERMIPKANGKLRRLGIPTVADRVVQAALKLVLEPIFEVDFEPCSYGFRPNRRAHDAIAEIHHYASRGYEWVLEGDIEACFDNIDHTALMGRVRERVGDKRVLRLIKAFLKSGIFSEGRAVRDTRTGTPQGGILSPLLANVALAVLDEHFAQVWQETGRTWAARDWHRRRGGATFKLVRYADDFVILAYGSRQHVEDLTADVAQVLSTVGLRLSPTKTAVAHIDEGFDFLGFRI

SEQ ID NO: 749 - protein, 271 aa, Brevibacterium linens
GVDGVAPRSLLHGQAVEVLTMIRRQVKTGEFRPLPVRERRIPKSNGKTRSLGIPTLADRVVQASLKLVLEPIFEADFYPSSYGFRPRRRAQDAIAEIHKFTSRPLNYEWVFEADITACFDEIDHTGLIQRLRGRITDKRVLALVRRFLKAGILSEDGVNRNTHTGTPQGGILSPLLANIALSGLDDHFQKKWESLGPSWTRAKLRRRGIPVMKLIRYADDFVVLVHGSVEHVEALWHEVAEVLAPMGLRLSVEKTKVTHIDEGFDFLGWRI

SEQ ID NO: 750 - protein, 261 aa, Bradyrhizobium japonicum
GADGITFAQIETEGRERWLENVRQELTAGDYRPQPLLRVWIPKSNGGRRPLSIPTVKDRTVMTAAMLVIGAIFEADLLENQYGFRPKVDAKMAVRRVFWHIRDHRRSEIVDADLRDYFTSIPHAPLMKCLTRRIADGRLLSMIKGWLTVAVIEKDGRRITRTAEARTKKRGTPQGSPLSPLLANLYFRRFLLAWRHGHQDQLDAHIVNYADDFVICCRPGSSETAMARMQTLMNRLGLEVNDTKTRLARVPESVTFLGYTI

SEQ ID NO: 751 - protein, 265 aa, unidentified
  REGION 1..265: note = Description of Unknown: Solibacter usitatus sequence
GVDGVTIEEIMKTDQGVAGFLEGIENSLRRKTYRPEAVQRVYIEKENGKLRPLGIPTVRDRVVQMATLLILEPIFEADFLDCSYGFRPGRSAHQALEEIRGHVEAGYQAVYDADLKGYFDSIPHTQLLACVRMRVVDRSVLKLIRMWLEAPVVEREEGGGGSKWSRPEKGTPQGGVASPLLANLYLHWFDALFYGPEGPGGKADAKLVRYADDFVVMAKQMGTETIEFIESRLEGKFQLEINREKTRVVDLREEGASLDFLSHTF

SEQ ID NO: 752 - protein, 261 aa, Geotalea uraniireducens
FGVDGVSIESIEVRADGISGYLDEIQESLRTKNYKPSPVRRVYITKPNGKLRPLGIPCVRDRIVQAAVLLILEPIFEVDFLDCSHGFRPKRRPHGALDQVGNNLQLGRQEVYDADLSSYFDSIPHEHLIVELERRIADRSVLKLIRQWLHSPVREEDGSISRPKQGTPQGGVISPLLANIYLHRLDRAFHEEADSPYHFARARMVRFADDFVVMARHMGNRITGWLEEKLETDLGLSINRDKTGIVRMNKKESLNFLGFTL

SEQ ID NO: 753 - protein, 247 aa, unidentified
  REGION 1..247: note = Description of Unknown: uncultured archaeon sequence
GIDDVTIDEFERNLEQNLNEIQRLLRQDRYVPKPVKRVYIPKPDGKQRPLGIPTIRDRVVQQALKNVIEPIFEAEFLDSSFGYRPGKSAKQAIEQIETVRDEGHEWVVDADIKAFFDTVNHEKLIDAVAERISDGRVLGLIRAFLEADIMEQGQGRAKNVVGTPQGGVISPLLANIYLHYFDERMALGFEVVRYADDVLVLCGSEEEAEEAISHVKEILEELELTLHPQKTKIKNFSEGVDFLGFTV

SEQ ID NO: 754 - protein, 171 aa, unidentified
  REGION 1..171: note = Description of Unknown: uncultured archaeon sequence
GVDNQTLDDIREEGIEQLLEQIQHELKTGTYRASCVRRVFIPKSSGKLRPLGIPTVKDRIVQQAVKLIIEPIFEADFLEFSYGYRPNRSAKDASLEIYKWLNYGLTNIVDVDIEGFFDHIDHELLLKFVKERVTDGYILSLIKQWLKAGIVYGKSVTNPTEGTPQGVSFLR

SEQ ID NO: 755 - protein, 255 aa, unidentified
  REGION 1..255: note = Description of Unknown: uncultured archaeon sequence
GVDGETIEDIENRGVDQFLTEIQQQLRMKTYRIPKVKRVFIPKGDGKLRPLGIPTIRDRVVQQAVKSIIEPIFEADFKDCSFGYRPGRSAMQASEKIRHLLNLGYTNIVDMDIKGFFDHIDHEKMVFSVMKRITDPYVIKLIREWLRAGIVFQGNTSYPEQGTPQGGVISPLLANIYLNELDSLWTRRGMESPLKHSAHLVRYADDLLALTNKDPQAVAETLERIISLLGLEPNREKSSVITAEDGFDFLGFHFI

SEQ ID NO: 756 - protein, 262 aa, Acidithiobacillus ferrivorans
GVDGERFEDVEAYGVERWIGELAETLRKKMYQPQAVKRVYIPKPGGKMRPLGIPTLRDRVVQTATMMVIEPIFEADLQPEQYAYRAGRNALTAVREVHSLLKTGHKQVVDADLSSYFDTIPHAELMKSVARRIVDRHLLHLIKMWLDAPVEEGDGRGNMQRTTVNRDQGRGTPQGAPISPLLSSLYMRRFILGWKQRGYEERFGSRIVCYADDLVICCRWQAEQAMAAMQDMMGRLKLTVNAEKTRICRVPEAYFDFLGYTF

SEQ ID NO: 757 - protein, 263 aa, Dechloromonas aromatica
GVDRQDFEDVEAYGVRRWLEELALALKEESYRPDPIRRVFIPKANGKLRPLGISTLHDRVCMTAAMLVLEPIFEADLPDEQYAYRPGRNAQQAAEEVKNRLYLGQTDVVDADLSDYFGSIPHSELMKSLARRIVDRRVLHLIKMWLECAVEETDQRGRKKRTTEAKDQGRGIPQGSPISPLLSNLYMRRFVLAWKKLGLERSLGSRIVTYADDLVILCKCGKAEEALQWMRTIMGKLKLTVNEEKTRICQVPAGTFDFLGYSF

SEQ ID NO: 758 - protein, 263 aa, Burkholderia sp.
GVDRQDFAEVEAYGVQKWLGELALALRLETYRPDSIRRVFIPKANGKLRPLGISTLRDRVCMTAAMLVLEPIFEADLPPEQYAYRPGRNAQQAVIEVEERLHRGQTDVVDADLADYFGSIPHAEMMLSLARRIVDRRVLHLIKMWLECPVEETDDRGRQKRTTEARDSRRGIPQGSPISPLLANVYMRRFVLAWKKLGLQRSLGSRIVTYADDLVILCKKGKAEEALLNLRQIMGKLKLTVNEEKTRICKVPEGEFDFLGFTF

SEQ ID NO: 759 - protein, 261 aa, Bradyrhizobium japonicum
GVDGITFEQIDASGLEAWLAGLRDELVTKTYRPDPVRRVMIPKPGGGERPLGIPTIRDRVVQAAAKIVLEPIFEADFEDGAYGYRPRRNAVDAVKEVHRLMCRGYTDVVDADLSKYFDTIPHSDLLKSVARRIVDRNVLRLIKLWLRVPVEERDSNGKRRMSGGKSNKCGTPQGGVISPLLSVIYMNRFLKHWRLSGRCEAFHGQIISYADDFVILSRGHAEDALTWTKAVMTKLGLTLNETKTSVKNARLESFDFLGYTL

SEQ ID NO: 760 - protein, 261 aa, Nitrobacter hamburgensis
GVDGMTFGQIEGAGVDAWLAGLREDLVSKTYQPDPVRRVMIPKPGGGERPLGIPTIRDRVVQAAAKIVLEPIFEAGFEDSAYGYRPRRSAIDAVKETHRLLCRGYTDVVDADLSKYFDTIPHADLLRSVARRVLDRNVLRLIKLWLQVPVEERDGDGKRHMSGGKSSTRGTPQGGVASPLLSVIYMNRFLKHWRLTGRGEVFHAHVISYADDFVILSRGHAEEALTWTRAVMTKLGLTLNEAKTSVKNARREGFDFLGYTL

SEQ ID NO: 761 - protein, 253 aa, Streptococcus agalactiae
GIDDFTIEEIEAYGVQKFLDEIEDQLRNKKYQPKAVKRVYIPKANGKKRPLGIPTVRDRVVQTAVKIVIEPIFEADFQEFSYGFRPKRSANQAIREIYKYLNYGCEWVIDADLKGYFDTIPHDKLLLLVKERVTDKSIIKLLSLWLEAGIMEDNQVRSNILGTPQGGVISPLLANIYLNALDRYWKNNRLEGRGHDAHLIRYADDFVILCSNNPKKYYQYAKQRIDKLGLTLNEEKTRIVHATEGFDFLGYTL

SEQ ID NO: 762 - protein, 264 aa, Geobacter sp.
GIDGVTFEAVEEKEGVSAFIAELEDALRNKTYQPDPVKRVMIPKSDGSQRPLGIPTIRDRVAQMAVKLVIEPIFEADFCESSYGFRPKRSAHDAVDDVAYSMNTGYTEVIDADLSKYFDTIPHANLMAVIAERICDGAILHLIQMWLKAPIMEVDKDGTKRNIGGGKGNRKGTPQGGVISPLLANLYLHILDRIWERGNLQQRLGARIVRYADDIVILCRRAKADKAMATLRYVLERLGLSLNEAKTTTVNAYKDKFDFLGFTI

SEQ ID NO: 763 - protein, 262 aa, Thiorhodococcus drewsii
GIDGVTFTAIEAGIGKDAYVAALREELEQKTYRADGVRRVWIPKPDGSERPLGIPTIRDRIVQMAFKLVVEPIFEADFCEHSYGFRPQRSAHDAIDAIAEALLRGHTQVIDADLSKYFDTIPHAKLMGVIAERLVDGPVLGLIRQWLKAPVIEEDERGQHRPTGGKGNRRGTPQGGVASPLLANLYLHLLDRIWVRHDLERRLGARLVRYADDAVILCRHSTEKPMAVFTAVLEKLDLTLNVQKTHVVDARADGFEFLGFRI

SEQ ID NO: 764 - protein, 263 aa, Thiocystis violascens
GSDGVSFEAIEQGEGVEGFLKGLAEELREKRYRAQPVRRAMIPKGDGRERPLGIPTIRDRVVQMAVKLVIEPIFEADFTPHSYGFRPQRSAHDAIDDIANALWAGHTHVIDADLSSYFDTIPHANLMTVVAERMTDGAILALLKQWLKAPIIGVDDQGKRRTVGGGKANRVGTPQGGVISPLLSNLYLHLLDRIWDRHRLKDKLGAHIVRYADDFVVLCKQGVEEPLKVVRHVTDRLGLTLNETKTHVVDAKETGFHFLGFTL

SEQ ID NO: 765 - protein, 260 aa, Porphyromonas gingivicanis
QCDTSLYQTWLSSIAQDTHSPLKKAELENLLEALHSLSYIPSVAHAIHIPKSDGSYRTLSIPSPIDLYLQRNLINVLYPIIDKTNSPQSYAYRKGKGALEAIKQVELLKRKLGKKYYVVRCDIDNFFDSIPIEQLMGMFQNITRDPLLSRMVRLWIKSGVVDNKSHFHPHLQGLPQGSPLSPLLSNFYLTDTDRYISNNITEYFIRYADDILLFIPEHSDPLSSLQALSNHLKNQKKLSLNKDFIVTEINSEFSFLGISF

SEQ ID NO: 766 - protein, 259 aa, Porphyromonas gulae
VNDALYRKWLSSLAADRDLPMAEAERQDLLEALRVCSYIPQPYHSVNIPKGDGSYRQLHIPSAVDLHLQRSLAGILYPITESLSIAQSYAYRKGKGAVAAIRKVQHLLDSLDENYTVVRCDIDNFFDSIPVPSLLQKVLRTTEDPLLTRMLSLWMKSGVVDRTQQYTPASSGIPQGSPLAPLLSNLYLEDTDRYIAGHITTEFIRYADDLLLFLPERADPLKALQDLSEHLKYRKGLKLNRDFVVSSIKSSFSFLGITF

SEQ ID NO: 767 - protein, 253 aa, Porphyromonas gingivalis
RKWLSSLAADRDLPMAEAERQDLLEALRICSYIPQPYHSVNIPKGDGSYRQLHIPSAVDLHLQRSLAGILYPITESLSIAQSYAYRKGKGAVAAVRRVQHLLDSLDENHTVVRCDIDNFFDSIPVPSLLQKVQRTTEDPFLTRMLSLWMKSGVVDRKQQYARASSGIPQGSPLAPLLSNLYLEDTDRYIAGHITTEFIRYADDLLLFLPEKVDPLNALQDLSEHLKYRKGLKLNRDFVVSSIKSSFSFLGITF

SEQ ID NO: 768 - protein, 257 aa, Porphyromonas gingivalis
DTLYRKWLSSLAADRDLPMAETERQDLLEALRICSYIPQPYHSVNIPKGDGSYRQLHIPSAVDLHLQRSLAGILYPITESLSIAQSYAYRKGKGAVAAVRRVQHLLDSLDENYTVVRCDIDNFFDSIPVPSLLQKVQRTTEDPLLTRMLSLWMKSGVVDRKQQYAPASSGIPQGSPLALLLSNLYLEDTDRYIAGHITTEFIRYADDLLLFLPEKVDPLNALQDLSEHLKYRKGLKLNRDFVVSSIKSSFSFLGITF

SEQ ID NO: 769 - protein, 265 aa, Psychrobacter lutiphocae
AIEEVLERHELEPVVDDKGRIMQVDALTELIYTQLSTGVYAPKPTRAIFVPKPKGGKRCIEELEQVDMMVHRLVFNSIAKTIESYQSPLSLGYRKGYSRQMARDKVQALIDSGFGWVVEADIESFFDNVPFERLWQRLATILPQRELQTIALIKKLMQVGYTVSNASGTVVKEHLRFKGLMQGSPLSPVLANLYLAMLDEQINAEHFAFVRYADDVLMFCRSEADANTTLAWLDQHLSELGLNLSLSKTAITAVNNGFEFLGYRF

SEQ ID NO: 770 - protein, 256 aa, Desulfovibrio bastinii
GAAASRLDRDNDFSASLERDYGSIGNAVFAMRDHILNGEFQCSPAAPFEINKPLGGRRTLGTFSSEDSLAQKLLHRLLSPVLDRMFEHSSVGFRKGRSREDAKRMIQQAIRQGCRYVFESDIDSFFDDIDRSTMLRKLRGVLPQADKMTFRALESCINAGLENEVDSTKGLVQGSSLSPLLSNLYLDSVDERMDEHGYRFIRYADDFVVLAHSEDEWRKACEDMQDSLEPLGLQLKEGKTHISCIDPGFKFLGIEL

SEQ ID NO: 771 - protein, 257 aa, Desulfovibrio hydrothermalis
GAAASKINRDSDLSSELERDYGSIEKAVFEMRDRILMGEFTCSAAVPFEMHKPYGGSRIIGTCPPEDTLTQKLLHQLLSPVMDRMFEHSSVGFRKGRSREDAKRMIRQAIREGCRYVFESDIDSFFDEIDRPTMLRKLQDALPQADHMTFKALKSCVNAGLVDEDRQDAKGLVQGSSLSPLLSNLYLDGVDERMEELGYRFIRYADDFVVLARSKEECRKAYEDMRLTLAPLGLSLKEQKTRISNIDPGFRFLGIDL

SEQ ID NO: 772 - protein, 252 aa, unidentified
  REGION 1..252: note = Description of Unknown: Candidatus Accumulibacter sp. BA-91 sequence
DLAVRLSNTPQAPDLHELAVELAQNLREGAAPLPFQAIRVPRSDGRLRQFETPAARDLVILNHLTRLLSEPFDRLFSVHSIGYRKGHSREDAVERVRAAIAEGCTHVLESDISDFFPSVDLKRLLARLDDVLPRRDVRLRQTLAAYLGAGWRYGEGSVQARNRGLPLGSPLSPLLANLYLDSFDSQLGATVPGVRLIRYADDFIILTESEAAARALLDTARDAAAALGLALNLEKTAIRPLSDGFDFLGIRF

SEQ ID NO: 773 - protein, 220 aa, Smithella sp.
YTPAPNTAFLIKKKSGVDRMVEQIALKDLILQQYLLKTIGNEFERIFEPESIGFRKGISRQRAVEMVQAALKAGYQFIIESDVDDFFPSVDLKILTGLLDRYLPQEDHRIKELLTKTIHNGYVLNGQYHERVRGVAQGSPLSPMLANLYLDYFDETIKGWPVRLIRYADDFIILTRTKEEAEEYLSRTESCLSEIGLKIKKEKTGIKHIREGFRFLGIKF

SEQ ID NO: 774 - protein, 279 aa, unidentified
  REGION 1..279: note = Description of Unknown: Candidatus Brocadia fulgida sequence
ALQALSETEKYPFDENQYAENLFQLIVSNGYLPTPHIAFTIKKKSGVDRVVEQLSFRDLIVQQYLLKVISTVFDRFFEAESIGFRKGVSRQRSIGMIQSAIAEGYQCVIESDIEDFFPSVDLDILEHLLDCSIPQNDVCLKNILLKLIRNGFILNGTYYERRKGLAQGGPLSPILANLYLDSFDEQIKRWGLASHDEDAGTDHAKGGAGNKTAGGNASRGVKLIRYADDFIILTRTKEEAEGVLSDTESYLSTLGLKIKKEKTAIRSLRDGFHFLGIRF

SEQ ID NO: 775 - protein, 230 aa, unidentified
  REGION 1..230: note = Description of Unknown: Candidatus Brocadia sinica sequence
MVEQIPFRDLIVQQYLLKIISAPFDRFFEAESIGFRRGVSRQRSIEIIQAAIAEGYQYVIESDIEDFFPSVDLNILAHLLDSYIPQNDSCLKKILLKFIKNGYILNGVYHERVKGLAQGSPLSPILANLYLDSFDEQIKQWGLLSPDEHGETASDSKDTPSRAAPAHTPRGVKLVRYADDFIILTKTKKDAEDVLSETEAYLSKLGLKIKKEKTAIRSMKDGFQFLGIRF

SEQ ID NO: 776 - protein, 247 aa, Actinomyces sp.
GLLQRQTRLIAGDLDRFLAELSASLRGGTYLPAPLLRADIPKRAPGQTRVLHIPTIRDRVVERAVVNAVAHDADRIMSPCSFAYRTGIGTDDAVHHLATLRDDGYRHVLRTDVEDYFPNLDVEDALTVLAPVVGCPRTIDLIRLIARPRRARGERRTRSRGIAQGSCLSPLLANLVLNDVDHALNDAGYGYARFADDIVVCAPARDDLLAARELLGSLVAAHGLNLNEEKTAMTTFDEGFCFLGVDF

SEQ ID NO: 777 - protein, 247 aa, Actinomyces cardiffensis
GVLQRQSKRIIENADEFLNQLSALLRNGTYEPEPLNRVDIPKGEHGKTRTLNIPTIHDRIVERAIVDTIAFTADLVQSSCSFAYRTGIGVDDAVHHVATLREEGYQYVLRTDIEDFFPHVNLEHALEALPESLQERDLLALLRIVALPRRAHGQRRARSRGVAQGSTLSPLLANLSLTRFDHDICDAGYGYARFADDIVVCSPREQDILDAIELLSDLAAAHGLKLNQDKTIMTTFDEGFCYLGVDF

SEQ ID NO: 778 - protein, 145 aa, Nocardiopsis potens
MRADIADCFEQIPRWPVVTRVKELVPDAEPCLLIQHLIARDATGPAARRVWSGRRRSRGLYQGSALSPALADLYLGAFGKAMLWAGRQVLRYADDFAIPAGSRTEAESALTTAEDVPAEWGPELNGAKSRIVSFDEGVDFLGRTV

SEQ ID NO: 779 - protein, 250 aa, Nocardiopsis baichengensis
GVKSTAVQEFEKGALRRLLDISEQLREGTYAPEPVTAFEVPKPSGEARLLGIGTVGDRVVERAVLAVIEPCIDPVLLPWSFAYRKGLGVPDAVQALAEARESGSTWVLRADFADCFETIPRWPVITRLHELVPDAELCLLVQHFIQRKSRGPGARRLRPGSGRGLHQGSALSPLLSNLYLDSFDRALLQRGRQVLRYGDDFAVPSESRHAAEQALAQATEAAREWGLELNAAKSQIVSFDEGVRFLGRTV

SEQ ID NO: 780 - protein, 248 aa, Frankia sp.
GQPDSEVDAFEANAARNLDELGTVLAAGEWQASPVRRVDLPKPSGGVRVLGVPRLVDRIVERALLRVLDPVIDPLLLPWSFAYRRGLGARDALAALAEARDSGMTWVARSDIRDCFPSIPQWEVLRRLREVVDDERIIHLVGVLLDRPVAGGRTDPKNRGLGLHQGSALSPLLSNLYLNAFDRAMLRAGFRVIRYSDDFAIPTTGRVAAEQALVSASTELEDLRLEINSGKSHVVSFDEGVRFLGEVT

SEQ ID NO: 781 - protein, 211 aa, Micromonospora rosaria
MTRVSIPKPDGGIRSLAIGAIEDRIVERAVLDVLDPVVDPTLSPWSFAYRRGLGVRDAVRALAEARESGLAFVVRCDIDDCFDSIPRWPLLRRLRELVSDAELVALVERLVGRPVTGERASGGRGLHQGGSLSPLLANLYLDTFDRALMRHGHRVVRYGDDIAISVPDRPTGLRVLDLADAEAEALSLRLNTDDRQVIAFDEGVPFCGQVV

SEQ ID NO: 782 - protein, 243 aa, Cellulomonas bogoriensis
GRVPVSVRRFERGVAASLVRLSGELSSGRYQPSRVSEVSLRTGSGSERVLRIGAVVDRVVERSLLNALTPVIDPLLSPFAFGFRRGLGVKDAVAALARARDEGSTHVLRSDIAAAFDSVPRARAVQALSRLVPDRRVCDVVASLLARLDDYGLEGVGIAQGSAVSPLLLNLYLLPFDEALMANGFTPLRYADDIAVPAMSESQAQSAAQDVAHQLECLGLACSAPKTSIRSFDEGVHFLGVTL

SEQ ID NO: 783 - protein, 246 aa, Corynebacterium durum
GNLAPSILKFQEDAEEKILRLSEALLDGSYKPYQFTEVDIETNGKERTLHIPAVQDRIVARAILATTTSRIDPLLGASAFGYRPGLGVADAVQAVVDAREAGLKWVLRTDVDDCFPSLSPDIAFDRFTQAVHDTDITDVVEQLLGRTVGNGKMRGTTLPGLPLGCPLSPVLMNLVLVDLDDALNAAGFTVVRYADDIVVVGESKEELEDAARFCQRILRSFNMQLGDDKTDIMTFDDGFAFLGEDF

SEQ ID NO: 784 - protein, 177 aa, Nakamurella multipartita
MAVLVPGPTRPDLPGQGVKVDQWSYTTLVDLTEGLRWVCRCDIDNCFPSIPKDRLRRKLTALFQGDPTLLGILTRLLARPAGGSPAEALPGLPQGSPLSPLWANLILADFDDAVARTGFPLVRYSDDMVIAAADRAEAWEAMRVAHDAAAGIEMSLGADKSAVMSFDEGFTFLGEDF

SEQ ID NO: 785 - protein, 193 aa, Propionicicella superfundia
MPDRIVARAILDTATPFVDPELGHCAFAYRPGLGVADAVQAIARQREEGLGWVLRTDIDECFPTLPVDLAHRRLAALVDDDDLASVLTALSARPYRTATRALRAVTGLPQGCPLSPVLANLVLVDVDRALLDRGYAPVRYGDDIAIPCANEDDAWEAARVTSEAAERLDMSLGSDKTHAMSFTEGFVFLGEEF

SEQ ID NO: 786 - protein, 248 aa, Kutzneria sp.
DQLSAGVRTFGDEADQRLAGLAEQLAGGMYLPGVLTELVMVTEDGGQRVLRVPAVRDRVVERALLSVLSPRLDPLLGPASFGFRPGLGVVDAVQALARLRDEGFGWVLRTDLHDCFPSVDLRRVRRLLEVLTSDGDLLGVLDLLLARAARRPGEQTLRPAHGLPQGSSLSPLLANLVLEDFDDRMRHAGFPLVRYADDIAVLASSEREAWEAARVASAAAKEIGMTLGADKTEIMSFDGGFCFLGEDF

SEQ ID NO: 787 - protein, 241 aa, Microlunatus phosphovorus
GVERFAEDPKAELDELGEQLRTGTYRPRDLTEVVIDDGGGSRTLHIPAVRDRVVERSLLNVVTPWVDPVLGFTSYAYRPGLGVADAVQALVTLRSEGLGWVLRTDVDDCFPSVPVDHARRLLGALVPDADLLAIVDLLLARAAVRPGRGRGVMRGLAQGCALSPLLTNLVLTALDDALLDEGFAVLRYADDICVATETRDDAWEAARIATAALEVLGMELGADKTEVMSFDEGFSFLGEDF

SEQ ID NO: 788 - protein, 239 aa, Pirellula staleyi
ALDQAASKWDLGGGEVQSAARDLVKGTYQPQPCFRLDIPKSNGDRRQLAIPSRLDRVLQRSILDVIAPALELFFEESSFAYRRGLGRHTAARHLSQAFTDGYRWALHADFFDFFDTIDHKLLRRRLAAYLADPSLVEVIMRWVETGAPHPDHGIPTGAPLSPILANLFLDQFDEAMHSVGRRLVRYADDFVVLFRDQSEAQAVISEVRQAAESLRLELNRDKTHTLHLATSFDFLGLHF

SEQ ID NO: 789 - protein, 249 aa, Thiomicrospira sp.
IEKKPTIDKLTERTHSQINSALGQIIKQDYNAPAMQGFTIPKKDGSERLLAVSPLYDRVLQKAAAIILTPGLDALMAQGSYGYRKGLSRQQVRYEIQNAYRQGYHWVYESDIEDFFDAVNRKQLLNRLQSLFGKDPIWKQLEDWLGQEIHYQETIVERTPHTGLPQGSPLSPVLANFVLDDFDSDMELHGFKMIRFADDFIILCKSRHEAELAALGVQHSLKQVSLDINRDKTHIVELSQGFRFLGYLF

SEQ ID NO: 790 - protein, 247 aa, Marinomonas mediterranea
DTDEEHHDAIDELLTKLYVSRERIFKREFTPSQLHSVEIEKPEGGTRLLSVPNWHDRTLQKAVTECLGNTLEHIWMKHSYGYRKGHSRLQARDQINQYIQQGYEWVLESDIESFFDSVNWLNLEQRLKLLLPNEPLVPLLMQWVSAAKQTEDEQTLARHNGLPQGAPISPILANLLLDDLDQDMIAKGHQIVRYADDFVLLFKSKAAAESALDDIITALKEHHLAINLEKTRIVEASQGFRYLGYLF

SEQ ID NO: 791 - protein, 245 aa, Teredinibacter turnerae
SFNITATEFRTTLYQQLAAIRACRYHPHPLVPVTIAKKDGTDRFLAVPPVGDRALQRVVTAQLSAELDPLFIQHSFGYRKGYSRQGARDAINQAIRAGYGWILESDIDSFFDSVAWSQMATRLRLFMGQDPLVDLIMQWLQTPVQETPAASAPAPRCAGLPQGAPISPLLANLLLDDFDQDMIVQGMKLVRFADDFVLLFKHQQQAQQALPRVVQSLAEHGLALKPEKTRIVSAQQGFRYLGYLF

SEQ ID NO: 792 - protein, 248 aa, Vibrio sinaloensis
SLDSQFSEQERNQYKNKVIGLSHTILAGDYKAPVLTQVEIDKSDGGVRTLSIPPLADRILQKAIARPLAVSLDGLWKTHSYGYRKDLSRHDAKFAINQAIQQGYEWVLESDVDSFFDNVDWRNLQTRLKLLLPNDFLVDVIMAWVKAPVKTPSGQILERTQGLPQGSPLSPLLANLVLDDFDADMLALDYKLIRYADDFVLLFKKQSEAQMALDHVIASLNEHGLNIKAKKTQIVHANKGFRYLGFWF

SEQ ID NO: 793 - protein, 248 aa, Vibrio metoecus
SLDNPLSEQQQREVLQSVMTGSECLIHQRYPVPTLQQVEIEKEEGGTRTLSIPPLIDRILQKAVARPLAASLEGLWKSHSYGYRSGLSRHDAKLAINQAIQNGYEWILESDVESFFDNVDWHNLETRLTLLLPNDALVDTIMAWVKAPIKTVTGEYQQRQQGLPQGSPLSPLLANLILDDFDADMLALDYQLVRYADDFVLLFKTEQQAQAALHRVIDSLNEHGLKIKAQKTHIVHAKTGFRYLGFWF

SEQ ID NO: 794 - protein, 242 aa, Photobacterium aphoticum
SETQKQHTLTQLRQQCAQLLEGTFTAPTLQQVDIDKDDGGTRTLSIPPWQDRVLQKAVASLLNEAFDPLWKHQSYGYRKGRSRFNAKDAINDAIRQGYEWALESDVDSFFDSVCWTNLAARLHLLFPSDPLVPVIMNWVKAPIRTPDGDEIPRTQGLPQGSPLSPLLANLILDDFDGDMLALDYQLVRYADDFVLLFTSQQQAQQALPHVIASLNEHGLTLKARKTHIVEAKKGFRYLGFLF

SEQ ID NO: 795 - protein, 255 aa, Teredinibacter turnerae
ECDLSQYECNEETDAEGDQAELPPTLLKRANALAQGRYDVPPLRGVIIPKTDGEWRALAVAPFFDAVLQRAVAQILAPSLDRVMDNRSYGYRRGRSRLDAKEQIQLAYRNGARWVLEADIEDFFDSVAFSLVAQRLRALFHQDPINEAILAWLSAPVDYDGLRLQRKAGLPQGSPLSPVLANLLLDDFDSDMRKAGFNCLRFADDFVVVCQSREEAERAWQRAASSLNEHGLFLAENKTRVISFERGFRFLGYLF

SEQ ID NO: 796 - protein, 261 aa, unidentified
  REGION 1..261: note = Description of Unknown: uncultured Thiohalocapsa sp. PBPSB1 sequence
GVEWIDADEQEPDAQDGAEAEADELAAPIEDLTRAIGHLQEGKYRVPELRGYLLPKRDGGLRPLAVPPLRDRVLQRAVQQTLGRGIEPLFSSGSHGYRPGHSRITAADAIRAAWAQGYRWVYESDVRDFFDSVDLQRLRERLEAIYGDDPVVAAVLGWMRAPVRFRGERIERRNGLPQGSPLSPLMANLMLDDFDSDMQAAGFRLIRFADDFIVLCKDPEEARRAGEAARASLAEQGLALHPDKTRITAMEDGFRYLGYLF

SEQ ID NO: 797 - protein, 252 aa, unidentified
  REGION 1..252: note = Description of Unknown: uncultured Thiohalocapsa sp. PBPSB1 sequence
PIDPDDPESMPDPEAEEALADRLEAIGERLRAMRYQAPALKGVVIRDPDGDLRALAIPPFWDRVAQRAVNDCITPACDLLMSEASHGYRRGRSRHTASLDINRAWQDGYRWVYEADIEDFFDSVDWDKLRLRLEALYRDDPVIDLILAWMAAVVDYQGFSVQRSMGLPQGAPLSPTMANLMLDDLDNDLEQAGFRLVRYADDFVVLCRDRAQAEAAGQEVRRSLAELGLQLNDAKSRVVSFQQGFRFLGFVF

SEQ ID NO: 798 - protein, 254 aa, Thiocapsa sp.
GGELWDTEYPEAPDPDEEEELADRLERLGKRLLEGDYRPPALRGVVYRDPDGDLRGLAIPPFWDRVAQRALVERIAPALEGVFSAASHGYRPGLSRHTASSAIQRAWREGYRWVYEADIEGFFDNLDWQRLAERLRALYRDDPAVDLLLAWMAAPVDYQGMRIERSRGLPQGAPLSPVLANLMLDDLDSDLEHAGFRLVRYADDFVVLCKDQERARAAGEAVRRSLAELGLILNESKSRSVSFEQGFRYLGFLF

SEQ ID NO: 799 - protein, 127 aa, Rhodobacter capsulatus
GQSIAAFAAKGAAAIARLSGLLRNGNYAPRPLRLHEIPKPDGGTRRLAIPAVSDRIVQTAVAAALTPGSSRCFPPTATATAPAVRWRWRWTGSRPCGGWATPGWSRPISKRPLTGSRMTRCSRRSIP

SEQ ID NO: 800 - protein, 249 aa, Photobacterium marinum
ESKKLPKKLHQSLPHEDFDQLYEQLHQGNYQTGLLTPRLLEKPGQKRRLLLLPPFIDKVAHKCLSRWLATSLDTLYSANSYGYRKGYSRLTAKDRISYLLSQGYKWVVDADIKAFFASIDRQQVAARLQALYGDDTLWPILDKMLNAAIDPNSELPLELSISGLNLGNSLSPILANLMLDHFDDVIREHKLELVRYADDFLILCREQQQANHAKDFVEQLLHSQALSLNPRKTRVTHVNKGFRFLGYLF

SEQ ID NO: 801 - protein, 246 aa, Vibrio sp.
DEQQALEQQRSDLPEMLQQVLHHDYWPAPLTPWLMQEQGRKERLILLAEFNDKVLHKTISLWLGASLDQLYSKTSYGYRKGYSRLSAKDRIINRIRAGYVYAVDADIRDFFPSVEQSRVLNRLSALYGADPLWTLVERFLSAPIRRQHLPAGYEDYERTGLDLGNSLSPVLANLMLDHLDAVMESLGYELIRYADDFLVLTKSRDKAQQALHMIEEILTAQGFALNHEKTRIRHFSEGIHFLGYLF

SEQ ID NO: 802 - protein, 247 aa, Oceanospirillum beijerinckii
TDEHKAWEQSRENLPDTLYRCWHLDYWPELLHPRLLQQAGKKERLLLLPPFPDKVIHKTISRWLSDSLDQLYSKSSYGYRKGYSRLGAKDRIIHLVRKGYKYALDADITDFFPSVNTNRILGRLAALYGQDPLWQLLERFLHCQIDRQNLPAGYEHHVNQGLNLGTSLSPVLANLMLDHLDSVLNNMDYELVRYADDFLVLCKHKQQAEDARVLIEQLLKQHDLQLNAEKTKVRSFASGIYFLGYLF

SEQ ID NO: 803 - protein, 247 aa, Phormidesmis priestleyi
GVDGITTDLFVGVANEQLAQMHRQLRREVYEASPAKGFYVPKKNGGQRLIALSTVRDRILQRYLLQSIYPRLEKAFTDSTFAYRPGLSIYGAVDRVMAIYAPQPTWVIKADIQQFFDNLSWGVLLSQLERLKVAPAQVRLIEQQLKAGLILQGQFYRPNKGVLQGGILSGALANLYLSEFDRLCQEAEIPLVRYGDDCVAVCHSYLQANRFLAMMQGWLEDIYLTLNPDKTRIVGPDEGFVFLGHMF

SEQ ID NO: 804 - protein, 247 aa, Leptolyngbya sp.
GVDGITVDLFKGIAQEQIRLLHQQMRQERYVASPAKGFYLPKKTGGDRLIGIPTVKDRIVQRYLLQGIYPHLENTFSEATFAYRPGLSIYTAVAQVMTRYRHQPAWVIKADIQQFFDRLSWPLLLHQLDQLPLPPVWMRWIEQQLKAGIVIRGHFQRPNQGVLQGSILSGALANLYLNDFDRRCLAADIDLVRYGDDCVAVCQSYLEATRSLALMQDWIEDLYLSLHPEKTQIIPPGEAFVFLGHRF

SEQ ID NO: 805 - protein, 247 aa, Microcystis aeruginosa
GIDGIPTDLFAGVVDEELSLLQRQLQQEYYQADPAKGFYRQKKSGGNRLIGIPTVRDRIVQRLLLHSIYPALEDVFSDRSYAYRPGLGVQSAIAHLSEVYAGQTVWTIKADVSRFFDSLNWALLLTRLERLSLEPVIVRMIEQQIKSGIVIDGQKLRQTKGVLQGGILSGALANLYLSDFDARCVGLNLDLVRYGDDFVIVTSGLLEATRVLDSLHHWLADIYLALQPEKTRIIAPDGEFTFLGYQF

SEQ ID NO: 806 - protein, 211 aa, Arthrospira platensis
MGFYRVKKSGGHRLIGIPTVRDRIVQRLLLRSLYPILEETFQDCSFAYRPGVGVKHAIERVAEVYSSQTWTIKADISQFFDSLCRTLLLSQLEELSVDQTVVRYIKGQLEAGIVVGGMPILSGRGVLQGGILSGALANLYLSEFDRRCLDAGAYLTRYGDDFVIVARSLLEATRFLNLIEDWLSDIYLTLQPEKTHIFAPGEEFVFLGYGF

SEQ ID NO: 807 - protein, 244 aa, Cyanothece sp.
GITTDLFAGVKKDELIRLQQELIEEIYQPYPARGFYLPKNNGDKRLLGIPAVRDRVVQRWLLEDLYLPLEEVFTDCSYAYRPGRGIQMAVKHLYYYYQIQPKWIIKSDIRSFFDSLNWSILLSILEHLKLDPIIQQLVEQQLKSGIVLKGRYFPRNQGVLQGAVLSGALANLYLSEFDRKCLEKGINLVRYGDDFVAACQSLGEAERTLNLITQWLERIYLQLHPKKTEIYAPDQEFTFLGYLF

SEQ ID NO: 808 - protein, 247 aa, Kamptonema sp.
GIDNITVDLFAGVARYQLQVLLWQLQQENYFPRPAKGFYLRKASGGKRLIGIPTVRDRIVQRFLLDELYWPLEDVFLDCSYAYRPGRGIQMAVKHLYSYYQFGQAWVIKADIEKFFDNLCWPLLLTDLEKLQFEPTLRQLIEQHLASGIVVKGQHFHPNQGVLQGGILSGALANLYLNEFDRLCLSHGFNLVRFGDDFAVACADSIQANRCLEQINSWLGSFYLKLQPEKTRIFAPDEEFTFLGYLF

SEQ ID NO: 809 - protein, 244 aa, Microcoleus sp.
GITTDLFAGVAKEQLYSLQRQLQQEHYAAHPALGFYLRKTRGGKRLIGIPVVLDRIVQRLLLEELYLPLEDTFLDCSYAYRPGRGIQMAVQHLESYYQFQPTWVIKADIAQFFDNLCHALLFTHLEQLQLEPIVLQLIEQQLKAGIVIKGQRLFPQKGVLQGAVLSGALANLYLTEFDRQCLSHGLNLVRYGDDFVVVAPDWIQANRALEQITTGLAQLYLTLQPEKTKIFAPDEEFTFLGYQF

SEQ ID NO: 810 - protein, 244 aa, Calothrix parietina
GISIGFFESMATEQLRNLVSQLQYGTYTASPAKGFYVPKKNGGKRLIGIPTVRDRIIQRLLLDELYFPLEDTFVDCSYAYRPGRNIQQAVQHLYRYYQYQPKWIIKADIVEFFDNICLALLLNALEKLRLEPNILQLIEQQIKSGIIINGQYQNAGKGLLQGGTLSGALANLYLTDFDQKCLNQGINLVRYGDDFVIACSNFAEANRVLDKITGWLGGVYLTLKAEKTEIFSPDDEFTFLGYRF

SEQ ID NO: 811 - protein, 244 aa, Nostoc sp.
GISVDLFESMATEQLQNIAYQLKEETYTANPAKGFYIPKKNGTKRLIGIHTVRDRIIQRLLLDELYFPLEDTFLDCSYAYRPGHSIQQAVQHLYGYYQYQPKWIIKADVADFFDNLSWALLLTYLEELSLEPSLLQLLEQQLKSGIIIAGQYRNFGKGVLQGGILSGALANLYLTSFDRKCLSQGINLVRYGDDFVIACNSWLEANRILDKITGWLGEVYLTLQPEKTQIFTPNDEFTFLGYRF

SEQ ID NO: 812 - protein, 244 aa, Calothrix sp.
GISVELFESMATEQLQNIANQLYDETYTASPAKGFYIPKKNGSKRLIGIPTVRDRIIQRLLLDELYFPLEDTFLDCSYAYRPGHNIHQAVQHLYGYYQYQPKWIIKTDIADFFDNLSWALLLTALDELSLEPIVLCLLEQQLHSGIIIAGQYRNFGKGVLQGGILSGALANLYLTNFDRKCLSQSINLVRYGDDFVIACNSWQEANRILDKITTWLGEVYLTLQPEKTQIFTPNEEFTFLGYRF

SEQ ID NO: 813 - protein, 247 aa, Scytonema hofmannii
GVDGISLDLFESVAAEQLRNIEYQLHHETYTASPAKGFYVPKKNGDKRLIGIPTVRDRIVQRLLLEELYFPLEDTFLDCSYAYRPGRNIQQAVQHLYSYYQLQPKWVIKADIAEFFDNLCWALLLTALEDLQLESIVLQLLEGQLKSGIVIAGKPVYPGKGVLQGGVLSGALANLYLTNFDRKCLSHGINLVRYGDDFAIACTSFHEANRILDKITTWLGELYLQLQPEKTQIYAPDDEFIFLGYRF

SEQ ID NO: 814 - protein, 247 aa, Scytonema hofmannii
GVDGIDVDLFASAVNDQLRILLRQLQQESYCASPAKGFYLAKSSGGKRLVGIPTVRDRIVQRLLLEELYFPLEDTFLDCSYAYRPGRNIQQAVQHLYSYYHLRPKWIIKADIAEFFDSLSWALLLTALEKLPLEPIVVQLLEGQLRSGIVINGKPIYPGKGVLQGGVLSGALANLYLNEFDKKCLHQGINLVRYGDDFAIACSNWREATRTLDKVAAWLGELYLNLQPEKTQIFAPDDEFTFLGYRF

SEQ ID NO: 815 - protein, 247 aa, Tolypothrix campylonemoides
GVDGMTVDLFAAGVNEQLRILLRQLQQESYRASPAKGFFVAKKSGGKRLIGIPTVRDRIVQRLLLEELYFPLEDTFLDCSYAYRPGRNIQQAVQHLYSYYQYQPKWIIKADIAEFFDNLCWALLFTALEDLQLEPILLQLLEQQLKSGIVIAGKPIYPGKGVLQGGVLSGALANLYLTSFERKCLSYGINLVRYGDDFAIACSSWLEANRILDKITTWLGELYLNLQPEKTQIFAPDDEFTFLGYRF

SEQ ID NO: 816 - protein, 244 aa, Anabaena cylindrica
GISVDLFAASVDEQLTILLRQLQQESYHPSPAKGFYLTKKTGGKRLVGIPTVQDRIVQRLLLEELYFPLEETFVDCSYAYRPGRNIQQAVQQLFSYYQYHPTWIIKADIAQFFDNLCWALLLTNLEALQLESRILQLLEQQLKAGIIIAGKHINFGKGVLQGGIISGALANLYLTIFDRKCLSNGINLVRYGDDFAVACSSWKEANRILDKIIAWLGELYLTLQPEKTQIFAPNEELKFLGYRF

SEQ ID NO: 817 - protein, 247 aa, Mastigocladus laminosus
GVDGITVDLFAASADQQLRIILRQLQQKSYRASPAKGFYLTKKSGGKRLIGISTVRDRIVQRLLLEELYLPLEDTFVDCSYAYRPGCNIQQAVQRLFSYYQYHPTWIIKADIAQFFDNLSWALLFTGLETLHLEAIVLELLEQQIKSGIVLGGKYINFGKGVLQGGILSGALANLYLTAFDRKCLSHGINLVRYGDDFAVACSSWTEANRILDKITTWLGGLYLTLQPEKTQVFAPHEEFTFLGYRF

SEQ ID NO: 818 - protein, 250 aa, Pseudoalteromonas rubra
GVDCQSIASFESELQLGLNSILYDLRQQHYTPAALKRSQLKLPGKKPRWLAFPTVRDRIVHTAIAILLQPYFEEEFEHNSYGYRPGRSYIMAVDKVIEHRNQRRRHVFDADIQGYFDHIPQDKLLTKLQATAIDPTLIELIFTLLFSFQQSNDGLVFGKALGQGIPQGSAICPLLANFYLDELDEHLNALGYHMVRYADDFVVCCDSAKAAQHAQYHTEQVLTHLALTLNLNKTQLTTFADGFKFLGHYF

SEQ ID NO: 819 - protein, 249 aa, Vibrio rotiferianus
GADGISIKEFASDLDTQLRQLHYDWKNNRYKPYRYRNITIEKANKKPRELAVPTVRDRILHSALAQKLLNIFEAEFEHISYGYRPNRSYTHAIRHIEQLRDQGYSTVIDADIQGYFDNICHIKLTELLNRHLPSDWVSAITDTLLSQQQADGHLYFGAEIGVGIPQGSPLSPLLANLYLDGFDEALLDRGEQIIRYADDFVILLPNEDRAQSCLAFVTDYLNQLKLTLNCEKTKVVSFQDGFTFLGVTF

SEQ ID NO: 820 - protein, 246 aa, Vibrio vulnificus
GVTIQTFAIHLDTNLNTLLSAWNHGNYAPSPYRPLTIQPNEKKTRQLAIPTVADRIIHTAIAQKLVAKFEPEFEHISYGYRPNRSYTHAIRHIEQLRNQGYLYVLDADIKGYFDHICHKRLKQILQKYLEDNWVESIMTLLLSQQMPAQTLLFGVELGRGIPQGSPLSPLLANLYLDGFDEALLDRGEQIVRYADDFVVLVTHEQQAQHCLAFVTQYLASLKLQLNTEKTRVVSFQDGFTFLGVSF

SEQ ID NO: 821 - protein, 361 aa, Herpetosiphon aurantiacus
GPDAVTILDFEAAWVDHMQQLAMELQSQIYRPLPPRRLFLDKRDGGKRSIAILAVRDRIAQRAVLQILEPEIEPTFLDCSYGFRPYVGVPHALTRIERYRQQGLQWVAHADISDCFGTIDHQILLSQLHQRISDRAVVELIGQWLSVGVMEDAATTEASNWWDDGEDLLERLAKHGEDLLWPNQYPQAGPSYAPQMLDFEANRTDSLRKRALQGLASNAALWGITHSKRVISGLRSLAPLFKQVPGGSLTWGAAGIATLALIPLSQRLLRQHERGTLQGGAISPMLANIYLDSFDRAMTERGHILVRFADDFVLLGAHQAAVEQALADATNVLKRLRLATKESKTGVQHFNDGLTFLGHRF

SEQ ID NO: 822 - protein, 249 aa, unidentified
  REGION 1..249: note = Description of Unknown: Candidatus Accumulibacter sp. SK-02 sequence
GADEQTLAEFAADAEAQLGLLALQLTQGSYRPAPARLIPVAKPGGGVRELLLPAVRDRIVQSALARYLADLLEPDFGEASHAYRPGHSVATALHRLQALRDGGLVFVAVCDIHHFFDSVDHRRLFSLLDDLPLERRLREQMKTCVRIEVADVQGQGAWSLARGLAQGSPLSPVLANLFLMAFDAACARAGLALVRYADDCVLACASETEAQSALAFAADALENIGLALNTRKSRLASFAEGFEFLGAFC

SEQ ID NO: 823 - protein, 352 aa, Chloroflexus aurantiacus
GIDQITLHDFAADWPNQMVRLAEELRDGSYRPLPPRRVAIAKASGGERAIAILTIRDRIAQRAVQQVLTPLFEPLFLDCSYGSRLAVGVPEAIERVVRYTEQGLIWVIDGDIRAYFDSIDHGILLGLLRQRIDEPAILHLIAQWLAVGSVHTETPDETLPDSPLVALLRRSGELIHEALNAPSDPLPTAYDYPDLSRPASPHSGIPTGLFAALSLAQPAFEIARQLTPLLKRIGAQRLAVGGALAVGTVLLSELVHRAQASHDRRGTLQGGPLSPLLANIYLHPFDLAMTAHGARMVRFVDDFVVMCPDRTTAEHTLVLVERQLATLRLTLNPQKTRIVAYAGGIEFLGQAL

SEQ ID NO: 824 - protein, 362 aa, Roseiflexus sp.
GLDAVTLRDFEVDWTRQMAQLADELQQGTYRPLPAKRVAIPKASGGERAIAILAVRDRVAQRAVQQVLDPLFDPCFLDCSYGCRPYVGVPDAIARVQRYADQGLGWVVDADIATCFDSLDQRVLLSLVRQRIDELPVLKLIAQWLEAGVLQGEAALPGDTPPTPLQRGEAAVRRALSWGAERLHPPPPVGPYAAAMWETPGGSIGEDGWAPRQPGLESHLWTAVMLARPVIDGARQALPYLQRIGGRRLAVAGAVAVGALALSEAAARLRHASRRGVPQGGALSPLLANIYLHPFDVAMMGQGLRLVRFMDDFVVMCATQEEAECALQFAQRQLHILRLTLNAEKTHITAYADGIEFLGAAL

SEQ ID NO: 825 - protein, 245 aa, unidentified
  REGION 1..245: note = Description of Unknown: Candidatus Kuenenia stuttgartiensis sequence
GADGVTIERYEGNLDLNLRIMRKELTEQTYFPLPLLRILVDKGNGEARALCIPSVRDRIVQAAVLQLIEPVLEKEFEECSFAYRKGRSVKQAVYKVREYYEQGYQWVVDADIDAFFDSVDYSLLLLKFKCYIHDPCIQNLVGLWLKGEVWDGKTVTTLKKGIPQGSPISPILANLYLDEFDEELTRNGYKLVRFSDDFIILCKNSGMAKESLKLTKKILEKLLLELDEEQVINFDQGFKFLGVIF

SEQ ID NO: 826 - protein, 247 aa, Methylobacter tundripaludum
GVDYQTLAAFADRLHKNLETLRDEVNYETYQPQPLLRIELEKPGGGTRPLSIPTVRDRILQTAVTRVIEPLFEAEFEDCSFAYRKGRSVDQALDRIQLLQRQGYHWVVDADIQCFFDSIDHTLLMTMVGKLVTDVGLLRLIEQWLCATVVDGDRRFVLSKGVAQGSPIGPLLSNLYLHHLDEALLDNNLCLIRFADDFLILCKSQDHAEQALELTDSLLGELRLTLNTRKTQIVHFNQGFRFLGVQF

SEQ ID NO: 827 - protein, 248 aa, Pelodictyon phaeoclathratiforme
GYDKQSITDYSWRIEEHLADLGRQLLTNTYEPQPLLKLVMLKPTGKLRTLLIPTVMERVAQTAAAIVLTPLVESELGANTFAYRPGLSRMTAAREIERLRNLGYNWVVDADISSFFDTVDHPLLFQRFRELCDDEELLTLIARWLTAEIVDGQNPKVKNTIGLPQGCPISPMLANLYLDKFDERMEQEGFKLVRFADDFLILCKSKPKAEAALQLSESALAELKLQLNNEKTRITTFAEGFKYLGYLF

SEQ ID NO: 828 - protein, 248 aa, Chlorobium phaeobacteroides
GWDNTSIQDYSLRLEENLKSLSHALLTGTYRQSPLLKLVMLKPDGKERVLLIPGVIDRVAQTAASIVLSPIIEAELGNCTFAYRPGISREGAAREIDRLHREGYQWVLDADIRNFFDNVRHDLLFQRLVELVDDKEMISLLHRWLTAEIVDGLNPRTRNTMGLPQGCPISPALANLYLDRFDETMEQQGFKLVRFADDYLVLCKTRPKAEAALKLSESALAELKLELHSDKTRITTFAEGFKYLGYLF

SEQ ID NO: 829 - protein, 247 aa, Rubrivivax benzoatilyticus
GCDGEEVEQFAQGLLGRLHTLQAEVADGRYVARPLRVVALPKPSGGQRLLAIPGVRDRVLQAAMAHALGRRIEPTLDEASHAYRPGRSVLGALAALLALRDQGRSTVLKADVASFFDRIHQPTLLAQLRRFSADPGLLALVGQVLAAVLDDDGERRLMTRGVPQGSPLSPLLANLYLHPFDVGMRAQGFQLIRYADDLVLACLDADEAARAQDAAARALRELHLELNPAKTRIASFVSGFDFLGVRF

SEQ ID NO: 830 - protein, 220 aa, Tistrella mobilis
GGDGEGVATFQAGLDLRLARLAADLLGGTYRPGPWLIAGGAVVAPVADRVVMTAVATGLPDPSSDGDPAAVMARLAALGQQGAVHLLDGTITHVTDLVPHDLLCERLAALGGDARLVDLFGMWLAVADPEDGLGIPPGLPVSGLLARLHLGAVAARIAAAGVHLVPAAGEILVLATGAAAAEDARGRMLALLADHGLYVDVDLPRMIRLDQAGPRLGRIM

SEQ ID NO: 831 - protein, 247 aa, Pseudanabaena biceps
GVDRESVVHFAKNSEAYLSQLRRSLASGYYHPMPLRQLFIPKKAGGWRELGVPTVRDRIVQHALLNILHPLLEPQFEACSFAYRPGRSHLSAVRQIAQWRDRGYEWVLDADVVRYFENILWQRLLDEVAERLAAPEVLSLISAWLSVGVLSKEGLMFPQKGISQGSAISPILANVYLDDFDEIVTATGLKLVRYADDFVVMSRSQKRIVEAKDEVADLMNGIGLQLHPDKTRIVDFDRGFRFLGHAF

SEQ ID NO: 832 - protein, 202 aa, Leptolyngbya sp.
MRVPTVRDRIVQQALLNVLHPVLEPQFEPVSFAYRPGRSHKLAVEKVSAWHRRGYDWLLDGDIVSYFDQVEHSRLLSEVDERLGASDFETLALRLIEQWNTVGTLTSAGLVLPERGIPQGSVVSPILANVYLDDFDEALQASRFKLVRFADDFVVMGRSQRQAEQAQAKVAELLTTMGLQLHPDKTQITNFDRGFRFLGHAF

SEQ ID NO: 833 - protein, 247 aa, Nodosilinea nodulosa
GVDGETIYAFGLHKSRNLTRLLQQVATSTYRPLPLRQFFIPKKSGGWRELGVPTVRDRIVQQALLQVLHPVFEVEFEPQSYAYRPGRSHRMAVERVAHWRSRGYDWVLDADIVKYFDTLQHPRLLAEVKERLNQPWVLALLQGWITAGTLTREGILLPTCGVPQGSPISPLLANVYLDDFDELLTQAGHKLVRYADDFVVLARTQQRLVEAQTYVAQLLEGMGLSLHPNKTQITTFDRGFRFLGHAF

SEQ ID NO: 834 - protein, 204 aa, Synechococcus sp.
MRIPAVADRIVQQALLNVLYPILEPEFEVCSFAYRPGRSHRMAVDQIHAFSRRGYRWVMEADIFDYFDHIGHRRLLAEVAERLPGQDPSFCDLVLQLVQQWIAVGVVTQSGLILPQAGIPQGAVIAPILANVYLDDFDEALLRTPLKLVRYADDFVILGQRERQVQKILPEVAQQMAEIGLQLNMSKTRITNFQKGFKFLGHIF

SEQ ID NO: 835 - protein, 113 aa, Leptolyngbya sp.
MAIGHLVEQWIGSGVSTASGLILPNKGVPQGAVISPILANVYFDDFDEAIEAAGLKLVRYADDFVILAKSKARIERAYNLVASLLHAMGLELHPDKTRVTTFNEGFRFLGHTF

SEQ ID NO: 836 - protein, 157 aa, Rhodobacter capsulatus
AVDRISALRRMGYTWVVEADIEKAFDRIPHDPVLEALDTALDPAPGTRALIDLVGLWLAHGSGQLGTPGRGLAQGSPLSPLLSNLFFDGLDDRFDSGAARIVRFADDFVILARSEAGAEEARALAEEFVAGHGLRMVSRETRVVGFDRGFQFLGQLF

SEQ ID NO: 837 - protein, 240 aa, Woodsholea maritima
GGDGQTLAQFQRTVLLHLHRLGDDVRAGLYMPGPHRVVSIPKRAGGWRSLSIPCVRDRVLQTAVAQRLQPILEPEFEPESYGYRPGRSVAQAIARVATLRRQGFRWTVDADIERFFDCVPHGPLLERLRPFLGDPGLVGLVEMWLAGAGPHGRGLPQGSPISPLLANLYLDDVDEGLKSTHTRLVRFADDFVILTRNEDEALQALERARGLLDKLGLSLNLEKTRIVPFEGGLDFLGRKF

SEQ ID NO: 838 - protein, 240 aa, Loktanella vestfoldensis
GGDGVTIDAFDAIAEPRLQALHAALASGGYWPAPARVIEAKKPSGGTRTLRIPAIVDRVVQTAAALVLTPILDREFEDASFGYRPGRSVGQAVARVAYLRNAGYVWTVDGDIRAFFDEVPHAPLLDRVDRVLGCARTADLVERWLQVYCDGGRGLPQGMPLSPVLSNLYLDSIDEKIEKGGVRLVRFADDFLLLCRSEAVAEGALARMTGILREAGLKIHPEKTAIRRFEDATRFLGHMF

SEQ ID NO: 839 - protein, 244 aa, Tistrella mobilis
GESLDAFHIGVEPRLARLAADVRGGTYRPGPYRLLDVPKDDGGTRRLAIPCVADRVLMTSAALVMGPMLDATFEPSSHGYRPGRGVRTAIARVESLRDQGFHWVLDADITRFFDRVPHDRLLDRLQQATGDARLVDLVGLWLDGYDREGEAGRGDGLGLPQGSPVSPLLANLYLDTVDERIAAAGLHLVRFADDFVILAADEAAAEGARAHVAALLADHGLHLHPDKTRVVSFDQGFAFLGKLF

SEQ ID NO: 840 - protein, 237 aa, Desulfarculus baarsii
RQTLDDFAESLERNLEGLHAALRSASYRPGPIRNVSIPKRDGSPRRLSIPSVADRVVQTALCQGLTPILEPEMEDASFAYRPGRSVQMAVERVGRYFRQGYHWVVDGDIDDYFDSIPHHGLMAVLRRYVDDQDVLGLIAQWLAHAHAGGVGVSQGSPLSPLLANIYLDDMDERIGRTGARLVRFADDFLLLCKSEERARESLAAMSALLAEYGLGLNPDKTRIVNFEQGFEFLGRLF

SEQ ID NO: 841 - protein, 242 aa, Rhodobacter capsulatus
GGDGETIAHFARQAEFRLARLAHELQADLYRPGPLRQISVPKRKGEGMRVLSIPCVVDRIAQRATAAVLSAALEPQFSDASFGYRPGRSVAQAVARVDALRRQGFTWVVDADIKAFFDSVPHAPLAARLHAAGIEPQLIELIDLWLDSFSAEGVGLAQGSPISPVLANLHLDALDDSFGPRGSVRIVRFADDFVLLTRCRPGAEAALAKARDQLAEAGLRLNLAKTRIVPYDQALRFLGHLF

SEQ ID NO: 842 - protein, 240 aa, Rhodovulum sp.
GGDGMTVARFALVAESMIQRLAGALRSGQYRPGPARRAFIPKKDGGLRPLDIPCVHDRVVQGAATLVLDPVLDKAFADSSFAYRRGRSVAQAVARIGSLRRQGFTHVVDGDIRAYFERIPHDRLITKLEQHVDDQAMVDLIWLWLETYSLTGRGVPQGAPISPLLANLYLDAVDDRIERAGVRLVRFADDFVLLAKTPASAEKALVEMTRLLAEEGLEIHPEKTRLVSFEEGFRFLGHVF

SEQ ID NO: 843 - protein, 240 aa, Rhodovulum sp.
GGDGVPLARFLVNAPARIARLSAGLRDGSYAPGPLRRVDIPKKSGGTRPLAIPCVVDRIAQTAVMQALAPRLDEEFAESSFGYRLGRGVRDAVKRVAALRGKGHVYVVDADIAKFFESVPHDKLLERLAQSMTDGPLMRLIGLWIEHGGARGRGLPQGSPLSPLLANLYLDRLDDAFAKRGAHIVRFADDFVILAESRHGAEGALVRAEKLLAEHGLSLNREKTRVTSFDQGFRFLGHLF

SEQ ID NO: 844 - protein, 248 aa, Rhodovulum sulfidophilum
GGDGVTIDRFARRAPQRLTALSGALLDGRYRPGDLRRIDLKKRDGGTRPLAIPSVIDRVAQTAAALVLTPILDPLFDEASFGYRPGRSVAMAVRRIDMLRRRGFCHVVEADIVRCFERIPHEPVLSSLAKTLAGRVGADRLVDLVALWLEHAAMFLETPGLGLAQGSPLSPLLSNLYLDRLDDALDRRDVAVVRFADDFVLLCRSREAAAKALNRAENLLEAHGLELHGDGTRIVDFDRGFEFLGHLF

SEQ ID NO: 845 - protein, 237 aa, Azospirillum lipoferum
GLTVGRFAEAAPSRLLALHRTLRMGDYRPGPLRRLSIPKPDGALRPLAIPPVTDRVAQTAAALVLTPLLDGEFEDASFGYRPGRSVPQAVARVARWRDQGYDWVVDADIERYFERVPHDRLLIRLERSIGAGPLTELIAVWLESGAENGVGLPQGSPLSPLLSNLYLDDLDEALDGRGLRLVRFADDFVLLCRSRERAERALDHAAAVLEEHGLRLNRDKTRIVPFDQGFRFLGHLF

SEQ ID NO: 846 - protein, 237 aa, Azospirillum lipoferum
GMTVEEFSIDLPTRLVRLQLALAQGTYRPGRLRRVDVAKEDGGTRPLAIPPVVDRVAQTAVAQVLTPLLDPRMHDGSFAYRPGRSVAMAVARVAEHRRQGFGWVVDGDIERYFERVPHERMMACLARVIDEPPLLDLIELWLESFSAMGLGLPQGAPLSPLLANLYLDDIDDRIAARGVRLVRFADDFLLMCRGEAAAEDARDRMAALLAEHGLRLHPDKTRIVPFEQGFRFLGHLF

SEQ ID NO: 847 - protein, 1802 aa, synthetic construct
  REGION 1..1802: note = Description of Artificial Sequence: Synthetic polypeptide
MSTIDVTLKEVADPIRLKLAWTKIKKKGSIGGVDGVTISSFNANLEVNLSELSNQILTNQYTPEPLQAAHIPKPGKSEKRQLGLPSLKDKIVQSSLASILSDFYEIHFSNCSYAYRPGKGSVKAIGRVRDFLNRKNYWIASVDIDNFFDSVDHEICTSILKEQISDQSIIRLISLYFSSGMIKFDQWQDTEIGIPQGGAISPVISNIYLNKLDHFLHTLNAFFVRYADDIILFSNTQQSLSETYQKTNEFLNKKLNLKLNALDNPIINVSKGFSFLGIYFHRCQLKIDFKRIDEKIEKMKYIIHKQKQIDAVIKEINEFFNGVQRHYGNIIPDSYQLKNLESTVLDELSIFLAKMKNEGHINSKKACKLVLDPLVFMSERTKSQRDAVIDKIIADAFTIVDQKKDTDEKRIEKSVDSAIHQKRQAYAKKIATETEDKKYSIGLDIGTNSVGWAVITDEYKVPSKKFKVLGNTDRHSIKKNLIGALLFDSGETAEATRLKRTARRRYTRRKNRICYLQEIFSNEMAKVDDSFFHRLEESFLVEEDKKHERHPIFGNIVDEVAYHEKYPTIYHLRKKLVDSTDKADLRLIYLALAHMIKFRGHFLIEGDLNPDNSDVDKLFIQLVQTYNQLFEENPINASGVDAKAILSARLSKSRRLENLIAQLPGEKKNGLFGNLIALSLGLTPNFKSNFDLAEDAKLQLSKDTYDDDLDNLLAQIGDQYADLFLAAKNLSDAILLSDILRVNTEITKAPLSASMIKRYDEHHQDLTLLKALVRQQLPEKYKEIFFDQSKNGYAGYIDGGASQEEFYKFIKPILEKMDGTEELLVKLNREDLLRKQRTFDNGSIPHQIHLGELHAILRRQEDFYPFLKDNREKIEKILTFRIPYYVGPLARGNSRFAWMTRKSEETITPWNFEEVVDKGASAQSFIERMTNFDKNLPNEKVLPKHSLLYEYFTVYNELTKVKYVTEGMRKPAFLSGEQKKAIVDLLFKTNRKVTVKQLKEDYFKKIECFDSVEISGVEDRFNASLGTYHDLLKIIKDKDFLDNEENEDILEDIVLTLTLFEDREMIEERLKTYAHLFDDKVMKQLKRRRYTGWGRLSRKLINGIRDKQSGKTILDFLKSDGFANRNFMQLIHDDSLTFKEDIQKAQVSGQGDSLHEHIANLAGSPAIKKGILQTVKVVDELVKVMGRHKPENIVIEMARENQTTQKGQKNSRERMKRIEEGIKELGSQILKEHPVENTQLQNEKLYLYYLQNGRDMYVDQELDINRLSDYDVDAIVPQSFLKDDSIDNKVLTRSDKNRGKSDNVPSEEVVKKMKNYWRQLLNAKLITQRKFDNLTKAERGGLSELDKAGFIKRQLVETRQITKHVAQILDSRMNTKYDENDKLIREVKVITLKSKLVSDFRKDFQFYKVREINNYHHAHDAYLNAVVGTALIKKYPKLESEFVYGDYKVYDVRKMIAKSEQEIGKATAKYFFYSNIMNFFKTEITLANGEIRKRPLIETNGETGEIVWDKGRDFATVRKVLSMPQVNIVKKTEVQTGGFSKESILPKRNSDKLIARKKDWDPKKYGGFDSPTVAYSVLVVAKVEKGKSKKLKSVKELLGITIMERSSFEKNPIDFLEAKGYKEVKKDLIIKLPKYSLFELENGRKRMLASAGELQKGNELALPSKYVNFLYLASHYEKLKGSPEDNEQKQLFVEQHKHYLDEIIEQISEFSKRVILADANLDKVLSAYNKHRDKPIREQAENIIHLFTLTNLGAPAAFKYFDTTIDRKRYTSTKEVLDATLIHQSITGLYETRIDLSQLGGD

SEQ ID NO: 848 - protein, 1728 aa, synthetic construct
  REGION 1..1728: note = Description of Artificial Sequence: Synthetic polypeptide
MGQYQLQDAYGYCSYPRPQAAKSLLEKSLSDASLHQACQTMYPRQANFDSSDTDEEHHDAIDELLTKLYVSRERIFKREFTPSQLHSVEIEKPEGGTRLLSVPNWHDRTLQKAVTECLGNTLEHIWMKHSYGYRKGHSRLQARDQINQYIQQGYEWVLESDIESFFDSVNWLNLEQRLKLLLPNEPLVPLLMQWVSAAKQTEDEQTLARHNGLPQGAPISPILANLLLDDLDQDMIAKGHQIVRYADDFVLLFKSKAAAESALDDIITALKEHHLAINLEKTRIVEASQGFRYLGYLFGGSQYKLILNGKTLKGETTTEAVDAATAEKVFKQYANDNGVDGEWTYDDATKTFTVTEGGSKLDKKYSIGLDIGTNSVGWAVITDEYKVPSKKFKVLGNTDRHSIKKNLIGALLFDSGETAEATRLKRTARRRYTRRKNRICYLQEIFSNEMAKVDDSFFHRLEESFLVEEDKKHERHPIFGNIVDEVAYHEKYPTIYHLRKKLVDSTDKADLRLIYLALAHMIKFRGHFLIEGDLNPDNSDVDKLFIQLVQTYNQLFEENPINASGVDAKAILSARLSKSRRLENLIAQLPGEKKNGLFGNLIALSLGLTPNFKSNFDLAEDAKLQLSKDTYDDDLDNLLAQIGDQYADLFLAAKNLSDAILLSDILRVNTEITKAPLSASMIKRYDEHHQDLTLLKALVRQQLPEKYKEIFFDQSKNGYAGYIDGGASQEEFYKFIKPILEKMDGTEELLVKLNREDLLRKQRTFDNGSIPHQIHLGELHAILRRQEDFYPFLKDNREKIEKILTFRIPYYVGPLARGNSRFAWMTRKSEETITPWNFEEVVDKGASAQSFIERMTNFDKNLPNEKVLPKHSLLYEYFTVYNELTKVKYVTEGMRKPAFLSGEQKKAIVDLLFKTNRKVTVKQLKEDYFKKIECFDSVEISGVEDRFNASLGTYHDLLKIIKDKDFLDNEENEDILEDIVLTLTLFEDREMIEERLKTYAHLFDDKVMKQLKRRRYTGWGRLSRKLINGIRDKQSGKTILDFLKSDGFANRNFMQLIHDDSLTFKEDIQKAQVSGQGDSLHEHIANLAGSPAIKKGILQTVKVVDELVKVMGRHKPENIVIEMARENQTTQKGQKNSRERMKRIEEGIKELGSQILKEHPVENTQLQNEKLYLYYLQNGRDMYVDQELDINRLSDYDVDAIVPQSFLKDDSIDNKVLTRSDKNRGKSDNVPSEEVVKKMKNYWRQLLNAKLITQRKFDNLTKAERGGLSELDKAGFIKRQLVETRQITKHVAQILDSRMNTKYDENDKLIREVKVITLKSKLVSDFRKDFQFYKVREINNYHHAHDAYLNAVVGTALIKKYPKLESEFVYGDYKVYDVRKMIAKSEQEIGKATAKYFFYSNIMNFFKTEITLANGEIRKRPLIETNGETGEIVWDKGRDFATVRKVLSMPQVNIVKKTEVQTGGFSKESILPKRNSDKLIARKKDWDPKKYGGFDSPTVAYSVLVVAKVEKGKSKKLKSVKELLGITIMERSSFEKNPIDFLEAKGYKEVKKDLIIKLPKYSLFELENGRKRMLASAGELQKGNELALPSKYVNFLYLASHYEKLKGSPEDNEQKQLFVEQHKHYLDEIIEQISEFSKRVILADANLDKVLSAYNKHRDKPIREQAENIIHLFTLTNLGAPAAFKYFDTTIDRKRYTSTKEVLDATLIHQSITGLYETRIDLSQLGGD

SEQ ID NO: 849 - protein, 1758 aa, synthetic construct
  REGION 1..1758: note = Description of Artificial Sequence: Synthetic polypeptide
MGWLYNQMAMPETIFQAWYKVASNDGRPGWDNKSIEDYSLQLEENLKALSQALLTGTYKQGPLMKLVLLKPDGKDRVLLIPGVMDRVAQTAAAIVLSPIIEAELGNCTFAYRPGISREGAAREIDRLHREGYQWVLDADIRSFFDNVRHDLLFQRLVELIDDKEMISLLHRWLTAEIVDGINPRIQNTMGLPQGCPISPALANLYLDRFDETMEKEGFKLVRFADDYLVLCKTRPKAEAALKLSETALAELKLELHSDKTRITTFAEGFKYLGYLFIRALVIPTKMHPEEWYDKLGKFKLRKKSEHALPSDPDAMTGETAKFELETDQGEKIELTKNELLQTEFGCKLLESLDKKQLSVDEFLEKVARQDEERQKEKRDALKKLYSPFLNTDKKYSIGLDIGTNSVGWAVITDEYKVPSKKFKVLGNTDRHSIKKNLIGALLFDSGETAEATRLKRTARRRYTRRKNRICYLQEIFSNEMAKVDDSFFHRLEESFLVEEDKKHERHPIFGNIVDEVAYHEKYPTIYHLRKKLVDSTDKADLRLIYLALAHMIKFRGHFLIEGDLNPDNSDVDKLFIQLVQTYNQLFEENPINASGVDAKAILSARLSKSRRLENLIAQLPGEKKNGLFGNLIALSLGLTPNFKSNFDLAEDAKLQLSKDTYDDDLDNLLAQIGDQYADLFLAAKNLSDAILLSDILRVNTEITKAPLSASMIKRYDEHHQDLTLLKALVRQQLPEKYKEIFFDQSKNGYAGYIDGGASQEEFYKFIKPILEKMDGTEELLVKLNREDLLRKQRTFDNGSIPHQIHLGELHAILRRQEDFYPFLKDNREKIEKILTFRIPYYVGPLARGNSRFAWMTRKSEETITPWNFEEVVDKGASAQSFIERMTNFDKNLPNEKVLPKHSLLYEYFTVYNELTKVKYVTEGMRKPAFLSGEQKKAIVDLLFKTNRKVTVKQLKEDYFKKIECFDSVEISGVEDRFNASLGTYHDLLKIIKDKDFLDNEENEDILEDIVLTLTLFEDREMIEERLKTYAHLFDDKVMKQLKRRRYTGWGRLSRKLINGIRDKQSGKTILDFLKSDGFANRNFMQLIHDDSLTFKEDIQKAQVSGQGDSLHEHIANLAGSPAIKKGILQTVKVVDELVKVMGRHKPENIVIEMARENQTTQKGQKNSRERMKRIEEGIKELGSQILKEHPVENTQLQNEKLYLYYLQNGRDMYVDQELDINRLSDYDVDAIVPQSFLKDDSIDNKVLTRSDKNRGKSDNVPSEEVVKKMKNYWRQLLNAKLITQRKFDNLTKAERGGLSELDKAGFIKRQLVETRQITKHVAQILDSRMNTKYDENDKLIREVKVITLKSKLVSDFRKDFQFYKVREINNYHHAHDAYLNAVVGTALIKKYPKLESEFVYGDYKVYDVRKMIAKSEQEIGKATAKYFFYSNIMNFFKTEITLANGEIRKRPLIETNGETGEIVWDKGRDFATVRKVLSMPQVNIVKKTEVQTGGFSKESILPKRNSDKLIARKKDWDPKKYGGFDSPTVAYSVLVVAKVEKGKSKKLKSVKELLGITIMERSSFEKNPIDFLEAKGYKEVKKDLIIKLPKYSLFELENGRKRMLASAGELQKGNELALPSKYVNFLYLASHYEKLKGSPEDNEQKQLFVEQHKHYLDEIIEQISEFSKRVILADANLDKVLSAYNKHRDKPIREQAENIIHLFTLTNLGAPAAFKYFDTTIDRKRYTSTKEVLDATLIHQSITGLYETRIDLSQLGGD

SEQ ID NO: 850 - protein, 1753 aa, synthetic construct
  REGION 1..1753: note = Description of Artificial Sequence: Synthetic polypeptide
MGTANELPLLEQALSDDRLLAGWERVRANAGGPGVDGVTVEQFGGKVLRALAGLRQRVTASHYQALPLRRIEITRPGKAPRVLAVPCVADRVVQSAVALTISPRLDPGFEDFSFGYRPGRSVPRAVQHLAEARDSGLVWVAEADIQSCFDRIPWAALLQRLGEVLPDAGLLALIQHWLSLPLQWPDGHQQVRCMGVPQGSPLSPLLSNVFLDGMDKELAAGPWRVIRYADDFVIAAASREEARRGLAQAARWLRRLGLRLNLDKTRVIHFDQGFSFLGVRFRGRQMSAVQPGAEPWVLPRATQPRPHSPSSKPAQHSRSPAPTARASAPATPPSAQPEPLGPAAPSPNAAASAQPSQPRAADATLQDLQRLSVAPPNEPSPPRLRTDKKYSIGLDIGTNSVGWAVITDEYKVPSKKFKVLGNTDRHSIKKNLIGALLFDSGETAEATRLKRTARRRYTRRKNRICYLQEIFSNEMAKVDDSFFHRLEESFLVEEDKKHERHPIFGNIVDEVAYHEKYPTIYHLRKKLVDSTDKADLRLIYLALAHMIKFRGHFLIEGDLNPDNSDVDKLFIQLVQTYNQLFEENPINASGVDAKAILSARLSKSRRLENLIAQLPGEKKNGLFGNLIALSLGLTPNFKSNFDLAEDAKLQLSKDTYDDDLDNLLAQIGDQYADLFLAAKNLSDAILLSDILRVNTEITKAPLSASMIKRYDEHHQDLTLLKALVRQQLPEKYKEIFFDQSKNGYAGYIDGGASQEEFYKFIKPILEKMDGTEELLVKLNREDLLRKQRTFDNGSIPHQIHLGELHAILRRQEDFYPFLKDNREKIEKILTFRIPYYVGPLARGNSRFAWMTRKSEETITPWNFEEVVDKGASAQSFIERMTNFDKNLPNEKVLPKHSLLYEYFTVYNELTKVKYVTEGMRKPAFLSGEQKKAIVDLLFKTNRKVTVKQLKEDYFKKIECFDSVEISGVEDRFNASLGTYHDLLKIIKDKDFLDNEENEDILEDIVLTLTLFEDREMIEERLKTYAHLFDDKVMKQLKRRRYTGWGRLSRKLINGIRDKQSGKTILDFLKSDGFANRNFMQLIHDDSLTFKEDIQKAQVSGQGDSLHEHIANLAGSPAIKKGILQTVKVVDELVKVMGRHKPENIVIEMARENQTTQKGQKNSRERMKRIEEGIKELGSQILKEHPVENTQLQNEKLYLYYLQNGRDMYVDQELDINRLSDYDVDAIVPQSFLKDDSIDNKVLTRSDKNRGKSDNVPSEEVVKKMKNYWRQLLNAKLITQRKFDNLTKAERGGLSELDKAGFIKRQLVETRQITKHVAQILDSRMNTKYDENDKLIREVKVITLKSKLVSDFRKDFQFYKVREINNYHHAHDAYLNAVVGTALIKKYPKLESEFVYGDYKVYDVRKMIAKSEQEIGKATAKYFFYSNIMNFFKTEITLANGEIRKRPLIETNGETGEIVWDKGRDFATVRKVLSMPQVNIVKKTEVQTGGFSKESILPKRNSDKLIARKKDWDPKKYGGFDSPTVAYSVLVVAKVEKGKSKKLKSVKELLGITIMERSSFEKNPIDFLEAKGYKEVKKDLIIKLPKYSLFELENGRKRMLASAGELQKGNELALPSKYVNFLYLASHYEKLKGSPEDNEQKQLFVEQHKHYLDEIIEQISEFSKRVILADANLDKVLSAYNKHRDKPIREQAENIIHLFTLTNLGAPAAFKYFDTTIDRKRYTSTKEVLDATLIHQSITGLYETRIDLSQLGGD

SEQ ID NO: 851 - protein, 1698 aa, synthetic construct
  REGION 1..1698: note = Description of Artificial Sequence: Synthetic polypeptide
MSTLPTPSSTDQDSPPPFWTLARLAEALEHVSARQGGAGADEQTLAEFAADAEAQLGLLALQLTQGSYRPAPARLIPVAKPGGGVRELLLPAVRDRIVQSALARYLADLLEPDFGEASHAYRPGHSVATALHRLQALRDGGLVFVAVCDIHHFFDSVDHRRLFSLLDDLPLERRLREQMKTCVRIEVADVQGQGAWSLARGLAQGSPLSPVLANLFLMAFDAACARAGLALVRYADDCVLACASETEAQSALAFAADALENIGLALNTRKSRLASFAEGFEFLGAFCGAEGMLGGRPGEAACLPPTTGPVHEAAAADDERPPSHGHRPRLRDKKYSIGLDIGTNSVGWAVITDEYKVPSKKFKVLGNTDRHSIKKNLIGALLFDSGETAEATRLKRTARRRYTRRKNRICYLQEIFSNEMAKVDDSFFHRLEESFLVEEDKKHERHPIFGNIVDEVAYHEKYPTIYHLRKKLVDSTDKADLRLIYLALAHMIKFRGHFLIEGDLNPDNSDVDKLFIQLVQTYNQLFEENPINASGVDAKAILSARLSKSRRLENLIAQLPGEKKNGLFGNLIALSLGLTPNFKSNFDLAEDAKLQLSKDTYDDDLDNLLAQIGDQYADLFLAAKNLSDAILLSDILRVNTEITKAPLSASMIKRYDEHHQDLTLLKALVRQQLPEKYKEIFFDQSKNGYAGYIDGGASQEEFYKFIKPILEKMDGTEELLVKLNREDLLRKQRTFDNGSIPHQIHLGELHAILRRQEDFYPFLKDNREKIEKILTFRIPYYVGPLARGNSRFAWMTRKSEETITPWNFEEVVDKGASAQSFIERMTNFDKNLPNEKVLPKHSLLYEYFTVYNELTKVKYVTEGMRKPAFLSGEQKKAIVDLLFKTNRKVTVKQLKEDYFKKIECFDSVEISGVEDRFNASLGTYHDLLKIIKDKDFLDNEENEDILEDIVLTLTLFEDREMIEERLKTYAHLFDDKVMKQLKRRRYTGWGRLSRKLINGIRDKQSGKTILDFLKSDGFANRNFMQLIHDDSLTFKEDIQKAQVSGQGDSLHEHIANLAGSPAIKKGILQTVKVVDELVKVMGRHKPENIVIEMARENQTTQKGQKNSRERMKRIEEGIKELGSQILKEHPVENTQLQNEKLYLYYLQNGRDMYVDQELDINRLSDYDVDAIVPQSFLKDDSIDNKVLTRSDKNRGKSDNVPSEEVVKKMKNYWRQLLNAKLITQRKFDNLTKAERGGLSELDKAGFIKRQLVETRQITKHVAQILDSRMNTKYDENDKLIREVKVITLKSKLVSDFRKDFQFYKVREINNYHHAHDAYLNAVVGTALIKKYPKLESEFVYGDYKVYDVRKMIAKSEQEIGKATAKYFFYSNIMNFFKTEITLANGEIRKRPLIETNGETGEIVWDKGRDFATVRKVLSMPQVNIVKKTEVQTGGFSKESILPKRNSDKLIARKKDWDPKKYGGFDSPTVAYSVLVVAKVEKGKSKKLKSVKELLGITIMERSSFEKNPIDFLEAKGYKEVKKDLIIKLPKYSLFELENGRKRMLASAGELQKGNELALPSKYVNFLYLASHYEKLKGSPEDNEQKQLFVEQHKHYLDEIIEQISEFSKRVILADANLDKVLSAYNKHRDKPIREQAENIIHLFTLTNLGAPAAFKYFDTTIDRKRYTSTKEVLDATLIHQSITGLYETRIDLSQLGGD

SEQ ID NO: 852 - protein, 1692 aa, synthetic construct
  REGION 1..1692: note = Description of Artificial Sequence: Synthetic polypeptide
MLYVEQLATAWHLVQRGSRAAGIDGITVDLFTGIAREQIHQLYRQMRQERYVARPAKGFYLAKQKGGHRLIGIPTVRDRIVQRYLLQSIYPSLENAFSDAVFAYRPGLSIYAAVKRVMERYRYQPTWVIKADIQQFFDQLSWPLLLHQLDQLSLPATWVQWIEQQLKAGIVVSGQFYQPGQGVLPGSILSGALANLYLNDFDRHCLEADIPLVRYGDDCVAVCQSYLEASRSLALMQDWIEGLSLSFHPEKTTIIPPGQAFVFLGHRFRNGTVEGPARQKAEGRRQKAPQPGYGPPQLCSIVKSPRRMLATSTDDYWRDGMTTKLDKKYSIGLDIGTNSVGWAVITDEYKVPSKKFKVLGNTDRHSIKKNLIGALLFDSGETAEATRLKRTARRRYTRRKNRICYLQEIFSNEMAKVDDSFFHRLEESFLVEEDKKHERHPIFGNIVDEVAYHEKYPTIYHLRKKLVDSTDKADLRLIYLALAHMIKFRGHFLIEGDLNPDNSDVDKLFIQLVQTYNQLFEENPINASGVDAKAILSARLSKSRRLENLIAQLPGEKKNGLFGNLIALSLGLTPNFKSNFDLAEDAKLQLSKDTYDDDLDNLLAQIGDQYADLFLAAKNLSDAILLSDILRVNTEITKAPLSASMIKRYDEHHQDLTLLKALVRQQLPEKYKEIFFDQSKNGYAGYIDGGASQEEFYKFIKPILEKMDGTEELLVKLNREDLLRKQRTFDNGSIPHQIHLGELHAILRRQEDFYPFLKDNREKIEKILTFRIPYYVGPLARGNSRFAWMTRKSEETITPWNFEEVVDKGASAQSFIERMTNFDKNLPNEKVLPKHSLLYEYFTVYNELTKVKYVTEGMRKPAFLSGEQKKAIVDLLFKTNRKVTVKQLKEDYFKKIECFDSVEISGVEDRFNASLGTYHDLLKIIKDKDFLDNEENEDILEDIVLTLTLFEDREMIEERLKTYAHLFDDKVMKQLKRRRYTGWGRLSRKLINGIRDKQSGKTILDFLKSDGFANRNFMQLIHDDSLTFKEDIQKAQVSGQGDSLHEHIANLAGSPAIKKGILQTVKVVDELVKVMGRHKPENIVIEMARENQTTQKGQKNSRERMKRIEEGIKELGSQILKEHPVENTQLQNEKLYLYYLQNGRDMYVDQELDINRLSDYDVDAIVPQSFLKDDSIDNKVLTRSDKNRGKSDNVPSEEVVKKMKNYWRQLLNAKLITQRKFDNLTKAERGGLSELDKAGFIKRQLVETRQITKHVAQILDSRMNTKYDENDKLIREVKVITLKSKLVSDFRKDFQFYKVREINNYHHAHDAYLNAVVGTALIKKYPKLESEFVYGDYKVYDVRKMIAKSEQEIGKATAKYFFYSNIMNFFKTEITLANGEIRKRPLIETNGETGEIVWDKGRDFATVRKVLSMPQVNIVKKTEVQTGGFSKESILPKRNSDKLIARKKDWDPKKYGGFDSPTVAYSVLVVAKVEKGKSKKLKSVKELLGITIMERSSFEKNPIDFLEAKGYKEVKKDLIIKLPKYSLFELENGRKRMLASAGELQKGNELALPSKYVNFLYLASHYEKLKGSPEDNEQKQLFVEQHKHYLDEIIEQISEFSKRVILADANLDKVLSAYNKHRDKPIREQAENIIHLFTLTNLGAPAAFKYFDTTIDRKRYTSTKEVLDATLIHQSITGLYETRIDLSQLGGD

SEQ ID NO: 853 - protein, 1704 aa, synthetic construct
  REGION 1..1704: note = Description of Artificial Sequence: Synthetic polypeptide
MFTQEHLHFAWLQVCAGSKTAGVDGISVELFESMATEQLQNLVYQLNNETYTASPAKGFYIPKKNGDKRLVGIPTVRDRIIQRLLLDELYFPLEGTFLDCSYAYRPGHNILQAVQHLYGYYQYQPKWIIKADVADFFDNLSWALLLTFLEKLSLEPSVLQLIEQQLQSGMIIAGQYRNFGKGVLQGGILSGALANLYLTNFDKKCLSQGINLVRYGDDFVIACNSWQEANRILDKITVWLGEVYLTLQSEKTQIFTPNDEFTFLGYRFAGGEVYAPPPPKPVLKGEWVINDSGNPYFRTKPRPKKPVSHPPKACSIDKPINFPRASLSHYWQETMTTDKKYSIGLDIGTNSVGWAVITDEYKVPSKKFKVLGNTDRHSIKKNLIGALLFDSGETAEATRLKRTARRRYTRRKNRICYLQEIFSNEMAKVDDSFFHRLEESFLVEEDKKHERHPIFGNIVDEVAYHEKYPTIYHLRKKLVDSTDKADLRLIYLALAHMIKFRGHFLIEGDLNPDNSDVDKLFIQLVQTYNQLFEENPINASGVDAKAILSARLSKSRRLENLIAQLPGEKKNGLFGNLIALSLGLTPNFKSNFDLAEDAKLQLSKDTYDDDLDNLLAQIGDQYADLFLAAKNLSDAILLSDILRVNTEITKAPLSASMIKRYDEHHQDLTLLKALVRQQLPEKYKEIFFDQSKNGYAGYIDGGASQEEFYKFIKPILEKMDGTEELLVKLNREDLLRKQRTFDNGSIPHQIHLGELHAILRRQEDFYPFLKDNREKIEKILTFRIPYYVGPLARGNSRFAWMTRKSEETITPWNFEEVVDKGASAQSFIERMTNFDKNLPNEKVLPKHSLLYEYFTVYNELTKVKYVTEGMRKPAFLSGEQKKAIVDLLFKTNRKVTVKQLKEDYFKKIECFDSVEISGVEDRFNASLGTYHDLLKIIKDKDFLDNEENEDILEDIVLTLTLFEDREMIEERLKTYAHLFDDKVMKQLKRRRYTGWGRLSRKLINGIRDKQSGKTILDFLKSDGFANRNFMQLIHDDSLTFKEDIQKAQVSGQGDSLHEHIANLAGSPAIKKGILQTVKVVDELVKVMGRHKPENIVIEMARENQTTQKGQKNSRERMKRIEEGIKELGSQILKEHPVENTQLQNEKLYLYYLQNGRDMYVDQELDINRLSDYDVDAIVPQSFLKDDSIDNKVLTRSDKNRGKSDNVPSEEVVKKMKNYWRQLLNAKLITQRKFDNLTKAERGGLSELDKAGFIKRQLVETRQITKHVAQILDSRMNTKYDENDKLIREVKVITLKSKLVSDFRKDFQFYKVREINNYHHAHDAYLNAVVGTALIKKYPKLESEFVYGDYKVYDVRKMIAKSEQEIGKATAKYFFYSNIMNFFKTEITLANGEIRKRPLIETNGETGEIVWDKGRDFATVRKVLSMPQVNIVKKTEVQTGGFSKESILPKRNSDKLIARKKDWDPKKYGGFDSPTVAYSVLVVAKVEKGKSKKLKSVKELLGITIMERSSFEKNPIDFLEAKGYKEVKKDLIIKLPKYSLFELENGRKRMLASAGELQKGNELALPSKYVNFLYLASHYEKLKGSPEDNEQKQLFVEQHKHYLDEIIEQISEFSKRVILADANLDKVLSAYNKHRDKPIREQAENIIHLFTLTNLGAPAAFKYFDTTIDRKRYTSTKEVLDATLIHQSITGLYETRIDLSQLGGD

SEQ ID NO: 854 - protein, 1693 aa, synthetic construct
  REGION 1..1693: note = Description of Artificial Sequence: Synthetic polypeptide
METSVRHLGELTYPLRASAAFQRQALTGEPDLLTEIAAPDSLLNAWRYVFTRDAKDGYLLQQSQQIAADPDRFVAALSGALLSGRYQPEPQVEVLIPKKGKTSAMRELSIPSIRDRVVERAVLNAIIDRADLLQCSASFAFRRGLGVQAATHEITQLRDSGNRYVLLTDIANYFGRINIADSLRVLQRGLFCSRTLALLRFIAKPRRVVGRRRIRSRGLAQGSCLSPLLANLALTDIDFALADTGVGYVRFADDILLCAPSRTELAASQRLLASLAAHQGLQLNEEKTMHTSFDAGFCYLGVDFTAHQPVTDLHYGVKHTKQPAKVDKKYSIGLDIGTNSVGWAVITDEYKVPSKKFKVLGNTDRHSIKKNLIGALLFDSGETAEATRLKRTARRRYTRRKNRICYLQEIFSNEMAKVDDSFFHRLEESFLVEEDKKHERHPIFGNIVDEVAYHEKYPTIYHLRKKLVDSTDKADLRLIYLALAHMIKFRGHFLIEGDLNPDNSDVDKLFIQLVQTYNQLFEENPINASGVDAKAILSARLSKSRRLENLIAQLPGEKKNGLFGNLIALSLGLTPNFKSNFDLAEDAKLQLSKDTYDDDLDNLLAQIGDQYADLFLAAKNLSDAILLSDILRVNTEITKAPLSASMIKRYDEHHQDLTLLKALVRQQLPEKYKEIFFDQSKNGYAGYIDGGASQEEFYKFIKPILEKMDGTEELLVKLNREDLLRKQRTFDNGSIPHQIHLGELHAILRRQEDFYPFLKDNREKIEKILTFRIPYYVGPLARGNSRFAWMTRKSEETITPWNFEEVVDKGASAQSFIERMTNFDKNLPNEKVLPKHSLLYEYFTVYNELTKVKYVTEGMRKPAFLSGEQKKAIVDLLFKTNRKVTVKQLKEDYFKKIECFDSVEISGVEDRFNASLGTYHDLLKIIKDKDFLDNEENEDILEDIVLTLTLFEDREMIEERLKTYAHLFDDKVMKQLKRRRYTGWGRLSRKLINGIRDKQSGKTILDFLKSDGFANRNFMQLIHDDSLTFKEDIQKAQVSGQGDSLHEHIANLAGSPAIKKGILQTVKVVDELVKVMGRHKPENIVIEMARENQTTQKGQKNSRERMKRIEEGIKELGSQILKEHPVENTQLQNEKLYLYYLQNGRDMYVDQELDINRLSDYDVDAIVPQSFLKDDSIDNKVLTRSDKNRGKSDNVPSEEVVKKMKNYWRQLLNAKLITQRKFDNLTKAERGGLSELDKAGFIKRQLVETRQITKHVAQILDSRMNTKYDENDKLIREVKVITLKSKLVSDFRKDFQFYKVREINNYHHAHDAYLNAVVGTALIKKYPKLESEFVYGDYKVYDVRKMIAKSEQEIGKATAKYFFYSNIMNFFKTEITLANGEIRKRPLIETNGETGEIVWDKGRDFATVRKVLSMPQVNIVKKTEVQTGGFSKESILPKRNSDKLIARKKDWDPKKYGGFDSPTVAYSVLVVAKVEKGKSKKLKSVKELLGITIMERSSFEKNPIDFLEAKGYKEVKKDLIIKLPKYSLFELENGRKRMLASAGELQKGNELALPSKYVNFLYLASHYEKLKGSPEDNEQKQLFVEQHKHYLDEIIEQISEFSKRVILADANLDKVLSAYNKHRDKPIREQAENIIHLFTLTNLGAPAAFKYFDTTIDRKRYTSTKEVLDATLIHQSITGLYETRIDLSQLGGD

SEQ ID NO: 855 - protein, 677 aa, Moloney murine leukemia virus
TLNIEDEYRLHETSKEPDVSLGSTWLSDFPQAWAETGGMGLAVRQAPLIIPLKATSTPVSIKQYPMSQEARLGIKPHIQRLLDQGILVPCQSPWNTPLLPVKKPGTNDYRPVQDLREVNKRVEDIHPTVPNPYNLLSGLPPSHQWYTVLDLKDAFFCLRLHPTSQPLFAFEWRDPEMGISGQLTWTRLPQGFKNSPTLFDEALHRDLADFRIQHPDLILLQYVDDLLLAATSELDCQQGTRALLQTLGNLGYRASAKKAQICQKQVKYLGYLLKEGQRWLTEARKETVMGQPTPKTPRQLREFLGTAGFCRLWIPGFAEMAAPLYPLTKTGTLFNWGPDQQKAYQEIKQALLTAPALGLPDLTKPFELFVDEKQGYAKGVLTQKLGPWRRPVAYLSKKLDPVAAGWPPCLRMVAAIAVLTKDAGKLTMGQPLVILAPHAVEALVKQPPDRWLSNARMTHYQALLLDTDRVQFGPVVALNPATLLPLPEEGLQHNCLDILAEAHGTRPDLTDQPLPDADHTWYTDGSSLLQEGQRKAGAAVTTETEVIWAKALPAGTSAQRAELIALTQALKMAEGKKLNVYTDSRYAFATAHIHGEIYRRRGLLTSEGKEIKNKDEILALLKALFLPKRLSIIHCPGHQKGHSAEARGNRMADQAARKAAITETPDTSTLLIENSSP

SEQ ID NO: 856 - protein, 677 aa, synthetic construct
  REGION 1..677: note = Description of Artificial Sequence: Synthetic polypeptide
TLNIEDEYRLHETSKEPDVSLGSTWLSDFPQAWAETGGMGLAVRQAPLIIPLKATSTPVSIKQYPMSQEARLGIKPHIQRLLDQGILVPCQSPWNTPLLPVKKPGTNDYRPVQDLREVNKRVEDIHPTVPNPYNLLSGLPPSHQWYTVLDLKDAFFCLRLHPTSQPLFAFEWRDPEMGISGQLTWTRLPQGFKNSPTLFNEALHRDLADFRIQHPDLILLQYVDDLLLAATSELDCQQGTRALLQTLGNLGYRASAKKAQICQKQVKYLGYLLKEGQRWLTEARKETVMGQPTPKTPRQLREFLGKAGFCRLFIPGFAEMAAPLYPLTKPGTLFNWGPDQQKAYQEIKQALLTAPALGLPDLTKPFELFVDEKQGYAKGVLTQKLGPWRRPVAYLSKKLDPVAAGWPPCLRMVAAIAVLTKDAGKLTMGQPLVILAPHAVEALVKQPPDRWLSNARMTHYQALLLDTDRVQFGPVVALNPATLLPLPEEGLQHNCLDILAEAHGTRPDLTDQPLPDADHTWYTDGSSLLQEGQRKAGAAVTTETEVIWAKALPAGTSAQRAELIALTQALKMAEGKKLNVYTDSRYAFATAHIHGEIYRRRGWLTSEGKEIKNKDEILALLKALFLPKRLSIIHCPGHQKGHSAEARGNRMADQAARKAAITETPDTSTLLIENSSP

SEQ ID NO: 857 - protein, 677 aa, Moloney murine leukemia virus
TLNIEDEHRLHETSKEPDVSLGSTWLSDFPQAWAETGGMGLAVRQAPLIIPLKATSTPVSIKQYPMSQEARLGIKPHIQRLLDQGILVPCQSPWNTPLLPVKKPGTNDYRPVQDLREVNKRVEDIHPTVPNPYNLLSGLPPSHQWYTVLDLKDAFFCLRLHPTSQPLFAFEWRDPEMGISGQLTWTRLPQGFKNSPTLFDEALHRDLADFRIQHPDLILLQYVDDLLLAATSELDCQQGTRALLQTLGNLGYRASAKKAQICQKQVKYLGYLLKEGQRWLTEARKETVMGQPTPKTPRQLREFLGTAGFCRLWIPGFAEMAAPLYPLTKTGTLFNWGPDQQKAYQEIKQALLTAPALGLPDLTKPFELFVDEKQGYAKGVLTQKLGPWRRPVAYLSKKLDPVAAGWPPCLRMVAAIAVLTKDAGKLTMGQPLVILAPHAVEALVKQPPDRWLSNARMTHYQALLLDTDRVQFGPVVALNPATLLPLPEEGLQHNCLDILAEAHGTRPDLTDQPLPDADHTWYTDGSSLLQEGQRKAGAAVTTETEVIWAKALPAGTSAQRAELIALTQALKMAEGKKLNVYTDSRYAFATAHIHGEIYRRRGLLTSEGKEIKNKDEILALLKALFLPKRLSIIHCPGHQKGHSAEARGNRMADQAARKAAITETPDTSTLLIENSSP

SEQ ID NO: 858 - protein, 1053 aa, Staphylococcus aureus
MKRNYILGLDIGITSVGYGIIDYETRDVIDAGVRLFKEANVENNEGRRSKRGARRLKRRRRHRIQRVKKLLFDYNLLTDHSELSGINPYEARVKGLSQKLSEEEFSAALLHLAKRRGVHNVNEVEEDTGNELSTKEQISRNSKALEEKYVAELQLERLKKDGEVRGSINRFKTSDYVKEAKQLLKVQKAYHQLDQSFIDTYIDLLETRRTYYEGPGEGSPFGWKDIKEWYEMLMGHCTYFPEELRSVKYAYNADLYNALNDLNNLVITRDENEKLEYYEKFQIIENVFKQKKKPTLKQIAKEILVNEEDIKGYRVTSTGKPEFTNLKVYHDIKDITARKEIIENAELLDQIAKILTIYQSSEDIQEELTNLNSELTQEEIEQISNLKGYTGTHNLSLKAINLILDELWHTNDNQIAIFNRLKLVPKKVDLSQQKEIPTTLVDDFILSPVVKRSFIQSIKVINAIIKKYGLPNDIIIELAREKNSKDAQKMINEMQKRNRQTNERIEEIIRTTGKENAKYLIEKIKLHDMQEGKCLYSLEAIPLEDLLNNPFNYEVDHIIPRSVSFDNSFNNKVLVKQEENSKKGNRTPFQYLSSSDSKISYETFKKHILNLAKGKGRISKTKKEYLLEERDINRFSVQKDFINRNLVDTRYATRGLMNLLRSYFRVNNLDVKVKSINGGFTSFLRRKWKFKKERNKGYKHHAEDALIIANADFIFKEWKKLDKAKKVMENQMFEEKQAESMPEIETEQEYKEIFITPHQIKHIKDFKDYKYSHRVDKKPNRELINDTLYSTRKDDKGNTLIVNNLNGLYDKDNDKLKKLINKSPEKLLMYHHDPQTYQKLKLIMEQYGDEKNPLYKYYEETGNYLTKYSKKDNGPVIKKIKYYGNKLNAHLDITDDYPNSRNKVVKLSLKPYRFDVYLDNGVYKFVTVKNLDVIKKENYYEVNSKCYEEAKKLKKISNQAEFIASFYNNDLIKINGELYRVIGVNNDLLNRIEVNMIDITYREYLENMNDKRPPRIIKTIASKTQSIKKYSTDILGNLYEVKSKKHPQIIKKG

SEQ ID NO: 859 - RNA, 60 nt, synthetic construct
  misc_feature 1..60: note = Description of Artificial Sequence: Synthetic oligonucleotide
  source 1..60: mol_type = other RNA
gtcagggtcaggagccccccccctgaacccaggataaccctcaaagtcggggggcaaccc

SEQ ID NO: 860 - RNA, 56 nt, synthetic construct
  misc_feature 1..56: note = Description of Artificial Sequence: Synthetic oligonucleotide
  source 1..56: mol_type = other RNA
gggtcaggagccccccccctgaacccaggaaaaccctcaaagtcggggggcaaccc

SEQ ID NO: 861 - RNA, 56 nt, synthetic construct
  misc_feature 1..56: note = Description of Artificial Sequence: Synthetic oligonucleotide
  source 1..56: mol_type = other RNA
gggtcaggagccccccccctgcacccaggaaaaccctcaaagtcggggggcaaccc

SEQ ID NO: 862 - RNA, 56 nt, synthetic construct
  misc_feature 1..56: note = Description of Artificial Sequence: Synthetic oligonucleotide
  source 1..56: mol_type = other RNA
gggtcaggagccccccccctgcacccaggataaccctcaaagtcggggggcaaccc

SEQ ID NO: 863 - RNA, 60 nt, synthetic construct
  misc_feature 1..60: note = Description of Artificial Sequence: Synthetic oligonucleotide
  source 1..60: mol_type = other RNA
gtcagggtcaggagccccccccctgaacccaggaaaaccctcaaagtcggggggcaaccc

SEQ ID NO: 864 - RNA, 60 nt, synthetic construct
  misc_feature 1..60: note = Description of Artificial Sequence: Synthetic oligonucleotide
  source 1..60: mol_type = other RNA
gtcagggtcaggagccccccccctgcacccaggaaaaccctcaaagtcggggggcaaccc

SEQ ID NO: 865 - RNA, 51 nt, synthetic construct
  misc_feature 1..51: note = Description of Artificial Sequence: Synthetic oligonucleotide
  source 1..51: mol_type = other RNA
gggtcaggagccccccccctgaacccaggataaccctcaaagtcggggggc

SEQ ID NO: 866 - RNA, 13 nt, synthetic construct
  misc_feature 1..13: note = Description of Artificial Sequence: Synthetic oligonucleotide
  source 1..13: mol_type = other RNA
tggtggtggtggt

SEQ ID NO: 867 - RNA, 20 nt, synthetic construct
  misc_feature 1..20: note = Description of Artificial Sequence: Synthetic oligonucleotide
  source 1..20: mol_type = other RNA
gggacagggcagggacaggg

SEQ ID NO: 868 - RNA, 21 nt, synthetic construct
  misc_feature 1..21: note = Description of Artificial Sequence: Synthetic oligonucleotide
  source 1..21: mol_type = other RNA
gggtccgggtctgggtctggg

SEQ ID NO: 869 - RNA, 19 nt, synthetic construct
  misc_feature 1..19: note = Description of Artificial Sequence: Synthetic oligonucleotide
  source 1..19: mol_type = other RNA
gggcagggtctgggctggg

SEQ ID NO: 870 - RNA, 19 nt, synthetic construct
  misc_feature 1..19: note = Description of Artificial Sequence: Synthetic oligonucleotide
  source 1..19: mol_type = other RNA
gggctgggatgggaaaggg

SEQ ID NO: 871 - RNA, 19 nt, synthetic construct
  misc_feature 1..19: note = Description of Artificial Sequence: Synthetic oligonucleotide
  source 1..19: mol_type = other RNA
gggctctgggtgggccggg

SEQ ID NO: 872 - RNA, 18 nt, synthetic construct
  misc_feature 1..18: note = Description of Artificial Sequence: Synthetic oligonucleotide
  source 1..18: mol_type = other RNA
gggctgggctgggcaggg

SEQ ID NO: 873 - RNA, 17 nt, synthetic construct
  misc_feature 1..17: note = Description of Artificial Sequence: Synthetic oligonucleotide
  source 1..17: mol_type = other RNA
gggtgggctgggaaggg

SEQ ID NO: 874 - RNA, 17 nt, synthetic construct
  misc_feature 1..17: note = Description of Artificial Sequence: Synthetic oligonucleotide
  source 1..17: mol_type = other RNA
gggagggagggctaggg

SEQ ID NO: 875 - RNA, 17 nt, synthetic construct
  misc_feature 1..17: note = Description of Artificial Sequence: Synthetic oligonucleotide
  source 1..17: mol_type = other RNA
gggcagggctgggaggg

SEQ ID NO: 876 - RNA, 16 nt, synthetic construct
  misc_feature 1..16: note = Description of Artificial Sequence: Synthetic oligonucleotide
  source 1..16: mol_type = other RNA
gggtgggagggctggg

SEQ ID NO: 877 - RNA, 43 nt, synthetic construct
  misc_feature 1..43: note = Description of Artificial Sequence: Synthetic oligonucleotide
  source 1..43: mol_type = other RNA
gcgtaacctccatccgagttgcaagagagggaaacgcagtctc

SEQ ID NO: 878 - RNA, 160 nt, synthetic construct
  misc_feature 1..160: note = Description of Artificial Sequence: Synthetic polynucleotide
  source 1..160: mol_type = other RNA
ggaattgcgggaaaggggtcaacagccgttcagtaccaagtctcaggggaaactttgagatggccttgcaaagggtatggtaataagctgacggacatggtcctaaccacgcagccaagtcctaagtcaacagatcttctgttgatatggatgcagttca

SEQ ID NO: 879 - RNA, 42 nt, synthetic construct
  misc_feature 1..42: note = Description of Artificial Sequence: Synthetic oligonucleotide
  source 1..42: mol_type = other RNA
ttgacgcggttctatctagttacgcgttaaaccaactagaaa

SEQ ID NO: 880 - RNA, 42 nt, synthetic construct
  misc_feature 1..42: note = Description of Artificial Sequence: Synthetic oligonucleotide
  source 1..42: mol_type = other RNA
ttgacgcggttctatctacttacgcgttaaaccaactagaaa

SEQ ID NO: 881 - RNA, 44 nt, synthetic construct
  misc_feature 1..44: note = Description of Artificial Sequence: Synthetic oligonucleotide
  source 1..44: mol_type = other RNA
cgcgagtctaggggataacgcgttaaacttcctagaaggcggtt

SEQ ID NO: 882 - RNA, 44 nt, synthetic construct
  misc_feature 1..44: note = Description of Artificial Sequence: Synthetic oligonucleotide
  source 1..44: mol_type = other RNA
cgcggatctagattgtaacgcgttaaaccatctagaaggcggtt

SEQ ID NO: 883 - RNA, 44 nt, synthetic construct
  misc_feature 1..44: note = Description of Artificial Sequence: Synthetic oligonucleotide
  source 1..44: mol_type = other RNA
cgcgtcgctaccgcccggcgcgttaaacacactagaaggcggtt

SEQ ID NO: 884 - protein, 503 aa, synthetic construct
  REGION 1..503: note = Description of Artificial Sequence: Synthetic polypeptide
TLNIEDEYRLHETSKEPDVSLGSTWLSDFPQAWAETGGMGLAVRQAPLIIPLKATSTPVSIKQYPMSQEARLGIKPHIQRLLDQGILVPCQSPWNTPLLPVKKPGTNDYRPVQDLREVNKRVEDIHPTVPNPYNLLSGLPPSHQWYTVLDLKDAFFCLRLHPTSQPLFAFEWRDPEMGISGQLTWTRLPQGFKNSPTLFNEALHRDLADFRIQHPDLILLQYVDDLLLAATSELDCQQGTRALLQTLGNLGYRASAKKAQICQKQVKYLGYLLKEGQRWLTEARKETVMGQPTPKTPRQLREFLGKAGFCRLFIPGFAEMAAPLYPLTKPGTLFNWGPDQQKAYQEIKQALLTAPALGLPDLTKPFELFVDEKQGYAKGVLTQKLGPWRRPVAYLSKKLDPVAAGWPPCLRMVAAIAVLTKDAGKLTMGQPLVILAPHAVEALVKQPPDRWLSNARMTHYQALLLDTDRVQFGPVVALNPATLLPLPEEGLQHNCLDNSRLIN

SEQ ID NO: 885 - RNA, 37 nt, synthetic construct
  misc_feature 1..37: note = Description of Artificial Sequence: Synthetic oligonucleotide
  source 1..37: mol_type = other RNA
cgcggttctatctagttacgcgttaaaccaactagaa

SEQ ID NO: 886 - RNA, 68 nt, synthetic construct
  misc_feature 1..68: note = Description of Artificial Sequence: Synthetic oligonucleotide
  source 1..68: mol_type = other RNA
ggccggcatggtcccagcctcctcgctggcgccggctgggcaacatgcttcggcatggcgaatgggac

SEQ ID NO: 887 - RNA, 18 nt, synthetic construct
  misc_feature 1..18: note = Description of Artificial Sequence: Synthetic oligonucleotide
  source 1..18: mol_type = other RNA
ggtgggagacgtcccacc

SEQ ID NO: 888 - RNA, 24 nt, synthetic construct
  misc_feature 1..24: note = Description of Artificial Sequence: Synthetic oligonucleotide
  source 1..24: mol_type = other RNA
gagcagcatggcgtcgctgctcac

SEQ ID NO: 889 - RNA, 21 nt, synthetic construct
  misc_feature 1..21: note = Description of Artificial Sequence: Synthetic oligonucleotide
  source 1..21: mol_type = other RNA
ccatcagttgacaccctgagg

SEQ ID NO: 890 - RNA, 28 nt, synthetic construct
  misc_feature 1..28: note = Description of Artificial Sequence: Synthetic oligonucleotide
  source 1..28: mol_type = other RNA
gcagacctaagtggtgacatatggtctg

SEQ ID NO: 891 - RNA, 24 nt, synthetic construct
  misc_feature 1..24: note = Description of Artificial Sequence: Synthetic oligonucleotide
  source 1..24: mol_type = other RNA
catgcgattagaaataatcgcatg

SEQ ID NO: 892 - RNA, 118 nt, synthetic construct
  misc_feature 1..118: note = Description of Artificial Sequence: Synthetic polynucleotide
  source 1..118: mol_type = other RNA
tctgccatcaaagctgcgaccgtgctcagtctggtgggagacgtcccaccggccggcatggtcccagcctcctcgctggcgccggctgggcaacatgcttcggcatggcgaatgggac

SEQ ID NO: 893 - RNA, 76 nt, synthetic construct
  misc_feature 1..76: note = Description of Artificial Sequence: Synthetic oligonucleotide
  source 1..76: mol_type = other RNA
gttttagagctatacgtagcaagttaaaataaggctagtccgttatcaactttacgaagtggcaccgagtcggtgc

SEQ ID NO: 894 - RNA, 76 nt, synthetic construct
  misc_feature 1..76: note = Description of Artificial Sequence: Synthetic oligonucleotide
  source 1..76: mol_type = other RNA
gttttagagctatacgtagcaagttaaaataaggctagtccgttatcaactttacgaagtgggaccgagtcggtcc

SEQ ID NO: 895 - RNA, 88 nt, synthetic construct
  misc_feature 1..88: note = Description of Artificial Sequence: Synthetic oligonucleotide
  source 1..88: mol_type = other RNA
gttttagagctagctcatgaaaatgagctagcaagttaaaataaggctagtccgttatcaacttgaaaaagtgggaccgagtcggtcc

SEQ ID NO: 896 - RNA, 76 nt, synthetic construct
  misc_feature 1..76: note = Description of Artificial Sequence: Synthetic oligonucleotide
  source 1..76: mol_type = other RNA
gtttgagagctagaaatagcaagtttaaataaggctagtccgttatcaacttgaaaaagtgggaccgagtcggtcc

SEQ ID NO: 897 - RNA, 76 nt, synthetic construct
  misc_feature 1..76: note = Description of Artificial Sequence: Synthetic oligonucleotide
  source 1..76: mol_type = other RNA
gtttaagagctagaaatagcaagtttaaataaggctagtccgttatcaacttgaaaaagtggcaccgagtcggtgc

SEQ ID NO: 898 - RNA, 86 nt, synthetic construct
  misc_feature 1..86: note = Description of Artificial Sequence: Synthetic oligonucleotide
  source 1..86: mol_type = other RNA
gttttagagctatgctggaaacagcatagcaagttaaaataaggctagtccgttatcaacttgaaaaagtggcaccgagtcggtgc

SEQ ID NO: 899 - RNA, 86 nt, synthetic construct
  misc_feature 1..86: note = Description of Artificial Sequence: Synthetic oligonucleotide
  source 1..86: mol_type = other RNA
gtttaagagctatgctggaaacagcatagcaagtttaaataaggctagtccgttatcaacttgaaaaagtggcaccgagtcggtgc

SEQ ID NO: 900 - RNA, 75 nt, synthetic construct
  misc_feature 1..75: note = Description of Artificial Sequence: Synthetic oligonucleotide
  misc_feature 69..75: note = This region may encompass 3-7 nucleotides
  source 1..75: mol_type = other RNA
ggccggcatggtcccagcctcctcgctggcgccggctgggcaacatgcttcggcatggcgaatgggacttttttt

SEQ ID NO: 901 - RNA, 16 nt, synthetic construct
  misc_feature 1..16: note = Description of Artificial Sequence: Synthetic oligonucleotide
  source 1..16: mol_type = other RNA
tgggagacgtcccacc

SEQ ID NO: 902 - RNA, 23 nt, synthetic construct
  misc_feature 1..23: note = Description of Artificial Sequence: Synthetic oligonucleotide
  misc_feature 17..23: note = This region may encompass 3-7 nucleotides
  source 1..23: mol_type = other RNA
tgggagacgtcccaccttttttt

SEQ ID NO: 903 - RNA, 28 nt, synthetic construct
  misc_feature 1..28: note = Description of Artificial Sequence: Synthetic oligonucleotide
  misc_feature 22..28: note = This region may encompass 3-7 nucleotides
  source 1..28: mol_type = other RNA
ccatcagttgacaccctgaggttttttt

SEQ ID NO: 904 - RNA, 31 nt, synthetic construct
  misc_feature 1..31: note = Description of Artificial Sequence: Synthetic oligonucleotide
  misc_feature 25..31: note = This region may encompass 3-7 nucleotides
  source 1..31: mol_type = other RNA
catgcgattagaaataatcgcatgttttttt

SEQ ID NO: 905 - protein, 9 aa, synthetic construct
  REGION 1..9: note = Description of Artificial Sequence: Synthetic peptide
  MOD_RES 3..6: note = Any amino acid
PPXXXXIPK

SEQ ID NO: 906 - protein, 4 aa, synthetic construct
  REGION 1..4: note = Description of Artificial Sequence: Synthetic peptide
QAIL

SEQ ID NO: 907 - protein, 10 aa, synthetic construct
  REGION 1..10: note = Description of Artificial Sequence: Synthetic peptide
  MOD_RES 2: note = Any amino acid
  MOD_RES 7..8: note = Any amino acid
RXLGIPXXDR

SEQ ID NO: 908 - protein, 5 aa, synthetic construct
  REGION 1..5: note = Description of Artificial Sequence: Synthetic peptide
GTQGG

SEQ ID NO: 909 - protein, 5 aa, synthetic construct
  REGION 1..5: note = Description of Artificial Sequence: Synthetic peptide
ELERR

SEQ ID NO: 910 - protein, 13 aa, synthetic construct
  REGION 1..13: note = Description of Artificial Sequence: Synthetic peptide
  MOD_RES 4..5: note = Any amino acid
  MOD_RES 7..8: note = Any amino acid
  MOD_RES 11..12: note = Any amino acid
YTRXXYXXDDXXS

SEQ ID NO: 911 - DNA, 33 bp, synthetic construct
  misc_feature 1..33: note = Description of Artificial Sequence: Synthetic oligonucleotide
  source 1..33: mol_type = other DNA
gccaacatgaggatcacccatgtctgcagggcc

SEQ ID NO: 912 - protein, 131 aa, synthetic construct
  REGION 1..131: note = Description of Artificial Sequence: Synthetic polypeptide
GSASNFTQFVLVDNGGTGDVTVAPSNFANGVAEWISSNSRSQAYKVTCSVRQSSAQNRKYTIKVEVPKVATQTVGGEELPVAGWRSYLNMELTIPIFATNSDCELIVKAMQGLLKDGNPIPSAIAANSGIY

SEQ ID NO: 913 - protein, 150 aa, synthetic construct
  REGION 1..150: note = Description of Artificial Sequence: Synthetic polypeptide
  SITE 1..150: note = This sequence may encompass 1-30 "Gly Gly Gly Gly Ser" repeating units
GGGGSGGGGSGGGGSGGGGSGGGGSGGGGSGGGGSGGGGSGGGGSGGGGSGGGGSGGGGSGGGGSGGGGSGGGGSGGGGSGGGGSGGGGSGGGGSGGGGSGGGGSGGGGSGGGGSGGGGSGGGGSGGGGSGGGGSGGGGSGGGGSGGGGS

SEQ ID NO: 914 - protein, 30 aa, synthetic construct
  REGION 1..30: note = Description of Artificial Sequence: Synthetic polypeptide
  SITE 1..30: note = This sequence may encompass 1-30 residues
GGGGGGGGGGGGGGGGGGGGGGGGGGGGGG

SEQ ID NO: 915 - protein, 150 aa, synthetic construct
  REGION 1..150: note = Description of Artificial Sequence: Synthetic polypeptide
  SITE 1..150: note = This sequence may encompass 1-30 "Glu Ala Ala Ala Lys" repeating units
EAAAKEAAAKEAAAKEAAAKEAAAKEAAAKEAAAKEAAAKEAAAKEAAAKEAAAKEAAAKEAAAKEAAAKEAAAKEAAAKEAAAKEAAAKEAAAKEAAAKEAAAKEAAAKEAAAKEAAAKEAAAKEAAAKEAAAKEAAAKEAAAKEAAAK

SEQ ID NO: 916 - protein, 90 aa, synthetic construct
  REGION 1..90: note = Description of Artificial Sequence: Synthetic polypeptide
  SITE 1..90: note = This sequence may encompass 1-30 "Gly Gly Ser" repeating units
GGSGGSGGSGGSGGSGGSGGSGGSGGSGGSGGSGGSGGSGGSGGSGGSGGSGGSGGSGGSGGSGGSGGSGGSGGSGGSGGSGGSGGSGGS

SEQ ID NO: 917 - protein, 120 aa, synthetic construct
  REGION 1..120: note = Description of Artificial Sequence: Synthetic polypeptide
  SITE 1..120: note = This sequence may encompass 1-30 "Ser Gly Gly Ser" repeating units
SGGSSGGSSGGSSGGSSGGSSGGSSGGSSGGSSGGSSGGSSGGSSGGSSGGSSGGSSGGSSGGSSGGSSGGSSGGSSGGSSGGSSGGSSGGSSGGSSGGSSGGSSGGSSGGSSGGSSGGS

SEQ ID NO: 918 - protein, 60 aa, synthetic construct
  REGION 1..60: note = Description of Artificial Sequence: Synthetic polypeptide
  MOD_RES 1: note = Any amino acid
  MOD_RES 3: note = Any amino acid
  MOD_RES 5: note = Any amino acid
  MOD_RES 7: note = Any amino acid
  MOD_RES 9: note = Any amino acid
  MOD_RES 11: note = Any amino acid
  MOD_RES 13: note = Any amino acid
  MOD_RES 15: note = Any amino acid
  MOD_RES 17: note = Any amino acid
  MOD_RES 19: note = Any amino acid
  MOD_RES 21: note = Any amino acid
  MOD_RES 23: note = Any amino acid
  MOD_RES 25: note = Any amino acid
  MOD_RES 27: note = Any amino acid
  MOD_RES 29: note = Any amino acid
  MOD_RES 31: note = Any amino acid
  MOD_RES 33: note = Any amino acid
  MOD_RES 35: note = Any amino acid
  MOD_RES 37: note = Any amino acid
  MOD_RES 39: note = Any amino acid
  MOD_RES 41: note = Any amino acid
  MOD_RES 43: note = Any amino acid
  MOD_RES 45: note = Any amino acid
  MOD_RES 47: note = Any amino acid
  MOD_RES 49: note = Any amino acid
  MOD_RES 51: note = Any amino acid
  MOD_RES 53: note = Any amino acid
  MOD_RES 55: note = Any amino acid
  MOD_RES 57: note = Any amino acid
  MOD_RES 59: note = Any amino acid
  SITE 1..60: note = This sequence may encompass 1-30 "Xaa Pro" repeating units
XPXPXPXPXPXPXPXPXPXPXPXPXPXPXPXPXPXPXPXPXPXPXPXPXPXPXPXPXPXP

SEQ ID NO: 919 - protein, 21 aa, synthetic construct
  REGION 1..21: note = Description of Artificial Sequence: Synthetic peptide
  SITE 1..21: note = This sequence may encompass 1, 3 or 7 "Gly Gly Ser" repeating units
GGSGGSGGSGGSGGSGGSGGS

SEQ ID NO: 920 - protein, 16 aa, synthetic construct
  REGION 1..16: note = Description of Artificial Sequence: Synthetic peptide
SGSETPGTSESATPES

SEQ ID NO: 921 - protein, 32 aa, synthetic construct
  REGION 1..32: note = Description of Artificial Sequence: Synthetic polypeptide
SGGSSGGSSGSETPGTSESATPESSGGSSGGS

SEQ ID NO: 922 - protein, 10 aa, synthetic construct
  REGION 1..10: note = Description of Artificial Sequence: Synthetic peptide
SGGSGGSGGS

SEQ ID NO: 923 - protein, 4 aa, synthetic construct
  REGION 1..4: note = Description of Artificial Sequence: Synthetic peptide
SGGS

SEQ ID NO: 924 - protein, 60 aa, synthetic construct
  REGION 1..60: note = Description of Artificial Sequence: Synthetic polypeptide
SGGSSGGSSGSETPGTSESATPESAGSYPYDVPDYAGSAAPAAKKKKLDGSGSGGSSGGS

SEQ ID NO: 925 - protein, 6 aa, synthetic construct
  REGION 1..6: note = Description of Artificial Sequence: Synthetic peptide
GGSGGS

SEQ ID NO: 926 - protein, 9 aa, synthetic construct
  REGION 1..9: note = Description of Artificial Sequence: Synthetic peptide
GGSGGSGGS

SEQ ID NO: 927 - protein, 18 aa, synthetic construct
  REGION 1..18: note = Description of Artificial Sequence: Synthetic peptide
KRTADGSEFESPKKKRKV

SEQ ID NO: 928 - protein, 17 aa, synthetic construct
  REGION 1..17: note = Description of Artificial Sequence: Synthetic peptide
KRTADGSEFEPKKKRKV

SEQ ID NO: 929 - protein, 19 aa, synthetic construct
  REGION 1..19: note = Description of Artificial Sequence: Synthetic peptide
NLSKRPAAIKKAGQAKKKK

SEQ ID NO: 930 - protein, 11 aa, synthetic construct
  REGION 1..11: note = Description of Artificial Sequence: Synthetic peptide
RQRRNELKRSF

SEQ ID NO: 931 - protein, 38 aa, synthetic construct
  REGION 1..38: note = Description of Artificial Sequence: Synthetic polypeptide
NQSSNFGPMKGGNFGGRSSGPYGGGGQYFAKPRNQGGY

SEQ ID NO: 932 - protein, 16 aa, synthetic construct
  REGION 1..16: note = Description of Artificial Sequence: Synthetic peptide
  MOD_RES 3..12: note = Any amino acid
KRXXXXXXXXXXKKKL

SEQ ID NO: 933 - RNA, 76 nt, synthetic construct
  misc_feature 1..76: note = Description of Artificial Sequence: Synthetic oligonucleotide
  source 1..76: mol_type = other RNA
gttttagagctagaaatagcaagttaaaataaggctagtccgttatcaacttgaaaaagtggcaccgagtcggtgc

SEQ ID NO: 934 - RNA, 30 nt, synthetic construct
  misc_feature 1..30: note = Description of Artificial Sequence: Synthetic oligonucleotide
  source 1..30: mol_type = other RNA
aacattgacgcgtctctacgtgggggcgcg

SEQ ID NO: 935 - RNA, 55 nt, synthetic construct
  misc_feature 1..55: note = Description of Artificial Sequence: Synthetic oligonucleotide
  source 1..55: mol_type = other RNA
gggtcaggagccccccccctgaacccaggataaccctcaaagtcggggggcaacc

SEQ ID NO: 936 - protein, 16 aa, synthetic construct
  REGION 1..16: note = Description of Artificial Sequence: Synthetic peptide
RQIKIWFQNRRMKWKK

SEQ ID NO: 937 - protein, 9 aa, synthetic construct
  REGION 1..9: note = Description of Artificial Sequence: Synthetic peptide
RRRRRRRRR

SEQ ID NO: 938 - protein, 8 aa, synthetic construct
  REGION 1..8: note = Description of Artificial Sequence: Synthetic peptide
RRRRRRRR

SEQ ID NO: 939 - protein, 2117 aa, synthetic construct
  REGION 1..2117: note = Description of Artificial Sequence: Synthetic polypeptide
MKRTADGSEFESPKKKRKVDKKYSIGLDIGTNSVGWAVITDEYKVPSKKFKVLGNTDRHSIKKNLIGALLFDSGETAEATRLKRTARRRYTRRKNRICYLQEIFSNEMAKVDDSFFHRLEESFLVEEDKKHERHPIFGNIVDEVAYHEKYPTIYHLRKKLVDSTDKADLRLIYLALAHMIKFRGHFLIEGDLNPDNSDVDKLFIQLVQTYNQLFEENPINASGVDAKAILSARLSKSRRLENLIAQLPGEKKNGLFGNLIALSLGLTPNFKSNFDLAEDAKLQLSKDTYDDDLDNLLAQIGDQYADLFLAAKNLSDAILLSDILRVNTEITKAPLSASMIKRYDEHHQDLTLLKALVRQQLPEKYKEIFFDQSKNGYAGYIDGGASQEEFYKFIKPILEKMDGTEELLVKLNREDLLRKQRTFDNGSIPHQIHLGELHAILRRQEDFYPFLKDNREKIEKILTFRIPYYVGPLARGNSRFAWMTRKSEETITPWNFEEVVDKGASAQSFIERMTNFDKNLPNEKVLPKHSLLYEYFTVYNELTKVKYVTEGMRKPAFLSGEQKKAIVDLLFKTNRKVTVKQLKEDYFKKIECFDSVEISGVEDRFNASLGTYHDLLKIIKDKDFLDNEENEDILEDIVLTLTLFEDREMIEERLKTYAHLFDDKVMKQLKRRRYTGWGRLSRKLINGIRDKQSGKTILDFLKSDGFANRNFMQLIHDDSLTFKEDIQKAQVSGQGDSLHEHIANLAGSPAIKKGILQTVKVVDELVKVMGRHKPENIVIEMARENQTTQKGQKNSRERMKRIEEGIKELGSQILKEHPVENTQLQNEKLYLYYLQNGRDMYVDQELDINRLSDYDVDAIVPQSFLKDDSIDNKVLTRSDKNRGKSDNVPSEEVVKKMKNYWRQLLNAKLITQRKFDNLTKAERGGLSELDKAGFIKRQLVETRQITKHVAQILDSRMNTKYDENDKLIREVKVITLKSKLVSDFRKDFQFYKVREINNYHHAHDAYLNAVVGTALIKKYPKLESEFVYGDYKVYDVRKMIAKSEQEIGKATAKYFFYSNIMNFFKTEITLANGEIRKRPLIETNGETGEIVWDKGRDFATVRKVLSMPQVNIVKKTEVQTGGFSKESILPKRNSDKLIARKKDWDPKKYGGFDSPTVAYSVLVVAKVEKGKSKKLKSVKELLGITIMERSSFEKNPIDFLEAKGYKEVKKDLIIKLPKYSLFELENGRKRMLASAGELQKGNELALPSKYVNFLYLASHYEKLKGSPEDNEQKQLFVEQHKHYLDEIIEQISEFSKRVILADANLDKVLSAYNKHRDKPIREQAENIIHLFTLTNLGAPAAFKYFDTTIDRKRYTSTKEVLDATLIHQSITGLYETRIDLSQLGGDSGGSSGGSSGSETPGTSESATPESSGGSSGGSSTLNIEDEHRLHETSKEPDVSLGSTWLSDFPQAWAETGGMGLAVRQAPLIIPLKATSTPVSIKQYPMSQEARLGIKPHIQRLLDQGILVPCQSPWNTPLLPVKKPGTNDYRPVQDLREVNKRVEDIHPTVPNPYNLLSGLPPSHQWYTVLDLKDAFFCLRLHPTSQPLFAFEWRDPEMGISGQLTWTRLPQGFKNSPTLFDEALHRDLADFRIQHPDLILLQYVDDLLLAATSELDCQQGTRALLQTLGNLGYRASAKKAQICQKQVKYLGYLLKEGQRWLTEARKETVMGQPTPKTPRQLREFLGTAGFCRLWIPGFAEMAAPLYPLTKTGTLFNWGPDQQKAYQEIKQALLTAPALGLPDLTKPFELFVDEKQGYAKGVLTQKLGPWRRPVAYLSKKLDPVAAGWPPCLRMVAAIAVLTKDAGKLTMGQPLVILAPHAVEALVKQPPDRWLSNARMTHYQALLLDTDRVQFGPVVALNPATLLPLPEEGLQHNCLDILAEAHGTRPDLTDQPLPDADHTWYTDGSSLLQEGQRKAGAAVTTETEVIWAKALPAGTSAQRAELIALTQALKMAEGKKLNVYTDSRYAFATAHIHGEIYRRRGLLTSEGKEIKNKDEILALLKALFLPKRLSIIHCPGHQKGHSAEARGNRMADQAARKAAITETPDTSTLLIENSSPSGGSKRTADGSEFEPKKKRKV

SEQ ID NO: 940 - protein, 1777 aa, synthetic construct
  REGION 1..1777: note = Description of Artificial Sequence: Synthetic polypeptide
MKRTADGSEFESPKKKRKVDKKYSIGLDIGTNSVGWAVITDEYKVPSKKFKVLGNTDRHSIKKNLIGALLFDSGETAEATRLKRTARRRYTRRKNRICYLQEIFSNEMAKVDDSFFHRLEESFLVEEDKKHERHPIFGNIVDEVAYHEKYPTIYHLRKKLVDSTDKADLRLIYLALAHMIKFRGHFLIEGDLNPDNSDVDKLFIQLVQTYNQLFEENPINASGVDAKAILSARLSKSRRLENLIAQLPGEKKNGLFGNLIALSLGLTPNFKSNFDLAEDAKLQLSKDTYDDDLDNLLAQIGDQYADLFLAAKNLSDAILLSDILRVNTEITKAPLSASMIKRYDEHHQDLTLLKALVRQQLPEKYKEIFFDQSKNGYAGYIDGGASQEEFYKFIKPILEKMDGTEELLVKLNREDLLRKQRTFDNGSIPHQIHLGELHAILRRQEDFYPFLKDNREKIEKILTFRIPYYVGPLARGNSRFAWMTRKSEETITPWNFEEVVDKGASAQSFIERMTNFDKNLPNEKVLPKHSLLYEYFTVYNELTKVKYVTEGMRKPAFLSGEQKKAIVDLLFKTNRKVTVKQLKEDYFKKIECFDSVEISGVEDRFNASLGTYHDLLKIIKDKDFLDNEENEDILEDIVLTLTLFEDREMIEERLKTYAHLFDDKVMKQLKRRRYTGWGRLSRKLINGIRDKQSGKTILDFLKSDGFANRNFMQLIHDDSLTFKEDIQKAQVSGQGDSLHEHIANLAGSPAIKKGILQTVKVVDELVKVMGRHKPENIVIEMARENQTTQKGQKNSRERMKRIEEGIKELGSQILKEHPVENTQLQNEKLYLYYLQNGRDMYVDQELDINRLSDYDVDAIVPQSFLKDDSIDNKVLTRSDKNRGKSDNVPSEEVVKKMKNYWRQLLNAKLITQRKFDNLTKAERGGLSELDKAGFIKRQLVETRQITKHVAQILDSRMNTKYDENDKLIREVKVITLKSKLVSDFRKDFQFYKVREINNYHHAHDAYLNAVVGTALIKKYPKLESEFVYGDYKVYDVRKMIAKSEQEIGKATAKYFFYSNIMNFFKTEITLANGEIRKRPLIETNGETGEIVWDKGRDFATVRKVLSMPQVNIVKKTEVQTGGFSKESILPKRNSDKLIARKKDWDPKKYGGFDSPTVAYSVLVVAKVEKGKSKKLKSVKELLGITIMERSSFEKNPIDFLEAKGYKEVKKDLIIKLPKYSLFELENGRKRMLASAGELQKGNELALPSKYVNFLYLASHYEKLKGSPEDNEQKQLFVEQHKHYLDEIIEQISEFSKRVILADANLDKVLSAYNKHRDKPIREQAENIIHLFTLTNLGAPAAFKYFDTTIDRKRYTSTKEVLDATLIHQSITGLYETRIDLSQLGGDSGGSSGGSSGSETPGTSESATPESSGGSSGGSSEKIENEIVNKTYLAINSLEELRNMIGIKSDYFYKCLYVNDHFYNVIKIPKRKKDEYRELMIPNMALKNIQRWILDNVLYRRQVHKCATGFVPRKSIVNNAIPHVGQKYILKMDIENFFPSITFKQVRKIFSEMGYKFELATALANLCTVNNQLPQGAPTSPYIANIIFYNIDKRIFSYCQKNNLRYTRYADDITISGSNKVSFSKEIIREIVNQYNFRINESKTIMFKPGDRKKVTGIIVNEKISVPKTLIREVRKQIYFVNKFGLEEHLIRNNYSLDYEQQFIMSIYGKISFIKMIDFKKGVSLQKKFNEVLGNIESSNMYRDNIDFDDIELHWINSGGSKRTADGSEFEPKKKRKV

SEQ ID NO: 941 - protein, 1696 aa, synthetic construct
  REGION 1..1696: note = Description of Artificial Sequence: Synthetic polypeptide
MKRTADGSEFESPKKKRKVDKKYSIGLDIGTNSVGWAVITDEYKVPSKKFKVLGNTDRHSIKKNLIGALLFDSGETAEATRLKRTARRRYTRRKNRICYLQEIFSNEMAKVDDSFFHRLEESFLVEEDKKHERHPIFGNIVDEVAYHEKYPTIYHLRKKLVDSTDKADLRLIYLALAHMIKFRGHFLIEGDLNPDNSDVDKLFIQLVQTYNQLFEENPINASGVDAKAILSARLSKSRRLENLIAQLPGEKKNGLFGNLIALSLGLTPNFKSNFDLAEDAKLQLSKDTYDDDLDNLLAQIGDQYADLFLAAKNLSDAILLSDILRVNTEITKAPLSASMIKRYDEHHQDLTLLKALVRQQLPEKYKEIFFDQSKNGYAGYIDGGASQEEFYKFIKPILEKMDGTEELLVKLNREDLLRKQRTFDNGSIPHQIHLGELHAILRRQEDFYPFLKDNREKIEKILTFRIPYYVGPLARGNSRFAWMTRKSEETITPWNFEEVVDKGASAQSFIERMTNFDKNLPNEKVLPKHSLLYEYFTVYNELTKVKYVTEGMRKPAFLSGEQKKAIVDLLFKTNRKVTVKQLKEDYFKKIECFDSVEISGVEDRFNASLGTYHDLLKIIKDKDFLDNEENEDILEDIVLTLTLFEDREMIEERLKTYAHLFDDKVMKQLKRRRYTGWGRLSRKLINGIRDKQSGKTILDFLKSDGFANRNFMQLIHDDSLTFKEDIQKAQVSGQGDSLHEHIANLAGSPAIKKGILQTVKVVDELVKVMGRHKPENIVIEMARENQTTQKGQKNSRERMKRIEEGIKELGSQILKEHPVENTQLQNEKLYLYYLQNGRDMYVDQELDINRLSDYDVDAIVPQSFLKDDSIDNKVLTRSDKNRGKSDNVPSEEVVKKMKNYWRQLLNAKLITQRKFDNLTKAERGGLSELDKAGFIKRQLVETRQITKHVAQILDSRMNTKYDENDKLIREVKVITLKSKLVSDFRKDFQFYKVREINNYHHAHDAYLNAVVGTALIKKYPKLESEFVYGDYKVYDVRKMIAKSEQEIGKATAKYFFYSNIMNFFKTEITLANGEIRKRPLIETNGETGEIVWDKGRDFATVRKVLSMPQVNIVKKTEVQTGGFSKESILPKRNSDKLIARKKDWDPKKYGGFDSPTVAYSVLVVAKVEKGKSKKLKSVKELLGITIMERSSFEKNPIDFLEAKGYKEVKKDLIIKLPKYSLFELENGRKRMLASAGELQKGNELALPSKYVNFLYLASHYEKLKGSPEDNEQKQLFVEQHKHYLDEIIEQISEFSKRVILADANLDKVLSAYNKHRDKPIREQAENIIHLFTLTNLGAPAAFKYFDTTIDRKRYTSTKEVLDATLIHQSITGLYETRIDLSQLGGDSGGSSGGSSGSETPGTSESATPESSGGSSGGSSTIEVQRWEDKFEIKPGVWVYVPSVEARKVGGKILQAVRNKWIPPLYFYHLRTGGHLKAARLHLKSDFFAVVDIKQFFQSTSRSRITRDLKSYFTYSQAREISTFSTVRNLSHSPHKHVLPFGFVQSPILATLCLDKSYFGSLLRRLNKHHDLKLSVFMDDVIISSNNLAQLQAAYDEALVAMRKSGYQANMSKTQAPSSKISVFNLTLSKGVMKVTSQKMSDFLIDFYSSNYEPHRIGVKNYVEAVNPGQAKLFKLSGGSKRTADGSEFEPKKKRKV

SEQ ID NO: 942 - protein, 1759 aa, synthetic construct
  REGION 1..1759: note = Description of Artificial Sequence: Synthetic polypeptide
MKRTADGSEFESPKKKRKVDKKYSIGLDIGTNSVGWAVITDEYKVPSKKFKVLGNTDRHSIKKNLIGALLFDSGETAEATRLKRTARRRYTRRKNRICYLQEIFSNEMAKVDDSFFHRLEESFLVEEDKKHERHPIFGNIVDEVAYHEKYPTIYHLRKKLVDSTDKADLRLIYLALAHMIKFRGHFLIEGDLNPDNSDVDKLFIQLVQTYNQLFEENPINASGVDAKAILSARLSKSRRLENLIAQLPGEKKNGLFGNLIALSLGLTPNFKSNFDLAEDAKLQLSKDTYDDDLDNLLAQIGDQYADLFLAAKNLSDAILLSDILRVNTEITKAPLSASMIKRYDEHHQDLTLLKALVRQQLPEKYKEIFFDQSKNGYAGYIDGGASQEEFYKFIKPILEKMDGTEELLVKLNREDLLRKQRTFDNGSIPHQIHLGELHAILRRQEDFYPFLKDNREKIEKILTFRIPYYVGPLARGNSRFAWMTRKSEETITPWNFEEVVDKGASAQSFIERMTNFDKNLPNEKVLPKHSLLYEYFTVYNELTKVKYVTEGMRKPAFLSGEQKKAIVDLLFKTNRKVTVKQLKEDYFKKIECFDSVEISGVEDRFNASLGTYHDLLKIIKDKDFLDNEENEDILEDIVLTLTLFEDREMIEERLKTYAHLFDDKVMKQLKRRRYTGWGRLSRKLINGIRDKQSGKTILDFLKSDGFANRNFMQLIHDDSLTFKEDIQKAQVSGQGDSLHEHIANLAGSPAIKKGILQTVKVVDELVKVMGRHKPENIVIEMARENQTTQKGQKNSRERMKRIEEGIKELGSQILKEHPVENTQLQNEKLYLYYLQNGRDMYVDQELDINRLSDYDVDAIVPQSFLKDDSIDNKVLTRSDKNRGKSDNVPSEEVVKKMKNYWRQLLNAKLITQRKFDNLTKAERGGLSELDKAGFIKRQLVETRQITKHVAQILDSRMNTKYDENDKLIREVKVITLKSKLVSDFRKDFQFYKVREINNYHHAHDAYLNAVVGTALIKKYPKLESEFVYGDYKVYDVRKMIAKSEQEIGKATAKYFFYSNIMNFFKTEITLANGEIRKRPLIETNGETGEIVWDKGRDFATVRKVLSMPQVNIVKKTEVQTGGFSKESILPKRNSDKLIARKKDWDPKKYGGFDSPTVAYSVLVVAKVEKGKSKKLKSVKELLGITIMERSSFEKNPIDFLEAKGYKEVKKDLIIKLPKYSLFELENGRKRMLASAGELQKGNELALPSKYVNFLYLASHYEKLKGSPEDNEQKQLFVEQHKHYLDEIIEQISEFSKRVILADANLDKVLSAYNKHRDKPIREQAENIIHLFTLTNLGAPAAFKYFDTTIDRKRYTSTKEVLDATLIHQSITGLYETRIDLSQLGGDSGGSSGGSSGSETPGTSESATPESSGGSSGGSSKSAEYLNTFRLRNLGLPVMNNLHDMSKATRISVETLRLLIYTADFRYRIYTVEKKGPEKRMRTIYQPSRELKALQGWVLRNILDKLSSSPFSIGFEKHQSILNNATPHIGANFILNIDLEDFFPSLTANKVFGVFHSLGYNRLISSVLTKICCYKNLLPQGAPSSPKLANLICSKLDYRIQGYAGSRGLIYTRYADDLTLSAQSMKKVVKARDFLFSIIPSEGLVINSKKTCISGPRSQRKVTGLVISQEKVGIGREKYKEIRAKIHHIFCGKSSEIEHVRGWLSFILSVDSKSHRRLIAYISKLEKKYGKNPLNKAKTSGGSKRTADGSEFEPKKKRKV

SEQ ID NO: 943 - protein, 1809 aa, synthetic construct
  REGION 1..1809: note = Description of Artificial Sequence: Synthetic polypeptide
MKRTADGSEFESPKKKRKVDKKYSIGLDIGTNSVGWAVITDEYKVPSKKFKVLGNTDRHSIKKNLIGALLFDSGETAEATRLKRTARRRYTRRKNRICYLQEIFSNEMAKVDDSFFHRLEESFLVEEDKKHERHPIFGNIVDEVAYHEKYPTIYHLRKKLVDSTDKADLRLIYLALAHMIKFRGHFLIEGDLNPDNSDVDKLFIQLVQTYNQLFEENPINASGVDAKAILSARLSKSRRLENLIAQLPGEKKNGLFGNLIALSLGLTPNFKSNFDLAEDAKLQLSKDTYDDDLDNLLAQIGDQYADLFLAAKNLSDAILLSDILRVNTEITKAPLSASMIKRYDEHHQDLTLLKALVRQQLPEKYKEIFFDQSKNGYAGYIDGGASQEEFYKFIKPILEKMDGTEELLVKLNREDLLRKQRTFDNGSIPHQIHLGELHAILRRQEDFYPFLKDNREKIEKILTFRIPYYVGPLARGNSRFAWMTRKSEETITPWNFEEVVDKGASAQSFIERMTNFDKNLPNEKVLPKHSLLYEYFTVYNELTKVKYVTEGMRKPAFLSGEQKKAIVDLLFKTNRKVTVKQLKEDYFKKIECFDSVEISGVEDRFNASLGTYHDLLKIIKDKDFLDNEENEDILEDIVLTLTLFEDREMIEERLKTYAHLFDDKVMKQLKRRRYTGWGRLSRKLINGIRDKQSGKTILDFLKSDGFANRNFMQLIHDDSLTFKEDIQKAQVSGQGDSLHEHIANLAGSPAIKKGILQTVKVVDELVKVMGRHKPENIVIEMARENQTTQKGQKNSRERMKRIEEGIKELGSQILKEHPVENTQLQNEKLYLYYLQNGRDMYVDQELDINRLSDYDVDAIVPQSFLKDDSIDNKVLTRSDKNRGKSDNVPSEEVVKKMKNYWRQLLNAKLITQRKFDNLTKAERGGLSELDKAGFIKRQLVETRQITKHVAQILDSRMNTKYDENDKLIREVKVITLKSKLVSDFRKDFQFYKVREINNYHHAHDAYLNAVVGTALIKKYPKLESEFVYGDYKVYDVRKMIAKSEQEIGKATAKYFFYSNIMNFFKTEITLANGEIRKRPLIETNGETGEIVWDKGRDFATVRKVLSMPQVNIVKKTEVQTGGFSKESILPKRNSDKLIARKKDWDPKKYGGFDSPTVAYSVLVVAKVEKGKSKKLKSVKELLGITIMERSSFEKNPIDFLEAKGYKEVKKDLIIKLPKYSLFELENGRKRMLASAGELQKGNELALPSKYVNFLYLASHYEKLKGSPEDNEQKQLFVEQHKHYLDEIIEQISEFSKRVILADANLDKVLSAYNKHRDKPIREQAENIIHLFTLTNLGAPAAFKYFDTTIDRKRYTSTKEVLDATLIHQSITGLYETRIDLSQLGGDSGGSSGGSSGSETPGTSESATPESSGGSSGGSSELLLGIVIVVTCWMVVRIIRSSKNQEGYKRWRAGNYASENPYAKEKASGPLSQGLFSKRVRTTGARRFDDGAIRWCANLLATEESRLREVLDYIPRQYTCFHVRKRSGGFRYISAPAGDFRSMQQTIYHRILLLANIHPAVTGFCPGKSVSDNARVHLGRKNVLKVDLHDFFPSIRSPRVRAAFREMGYSRPIAKVLAELCCLRCCLPQGAPTSPALSNIIAYPMDKKMMALAGEYGLVYTRYADDLTFSGDYLPKDEVLVRIHRIIREEGFTMNVKKTRFLSEHKRKIITGVSVSSGKKMTLPKVKKREIRKNVHYVLTKGLVGHQEHIGSTDPVYLKRLLGSLCYWRSIEPDNRYVSDSITALKRLMSGGSKRTADGSEFEPKKKRKV

SEQ ID NO: 944 - protein, 1822 aa, synthetic construct
  REGION 1..1822: note = Description of Artificial Sequence: Synthetic polypeptide
MKRTADGSEFESPKKKRKVDKKYSIGLDIGTNSVGWAVITDEYKVPSKKFKVLGNTDRHSIKKNLIGALLFDSGETAEATRLKRTARRRYTRRKNRICYLQEIFSNEMAKVDDSFFHRLEESFLVEEDKKHERHPIFGNIVDEVAYHEKYPTIYHLRKKLVDSTDKADLRLIYLALAHMIKFRGHFLIEGDLNPDNSDVDKLFIQLVQTYNQLFEENPINASGVDAKAILSARLSKSRRLENLIAQLPGEKKNGLFGNLIALSLGLTPNFKSNFDLAEDAKLQLSKDTYDDDLDNLLAQIGDQYADLFLAAKNLSDAILLSDILRVNTEITKAPLSASMIKRYDEHHQDLTLLKALVRQQLPEKYKEIFFDQSKNGYAGYIDGGASQEEFYKFIKPILEKMDGTEELLVKLNREDLLRKQRTFDNGSIPHQIHLGELHAILRRQEDFYPFLKDNREKIEKILTFRIPYYVGPLARGNSRFAWMTRKSEETITPWNFEEVVDKGASAQSFIERMTNFDKNLPNEKVLPKHSLLYEYFTVYNELTKVKYVTEGMRKPAFLSGEQKKAIVDLLFKTNRKVTVKQLKEDYFKKIECFDSVEISGVEDRFNASLGTYHDLLKIIKDKDFLDNEENEDILEDIVLTLTLFEDREMIEERLKTYAHLFDDKVMKQLKRRRYTGWGRLSRKLINGIRDKQSGKTILDFLKSDGFANRNFMQLIHDDSLTFKEDIQKAQVSGQGDSLHEHIANLAGSPAIKKGILQTVKVVDELVKVMGRHKPENIVIEMARENQTTQKGQKNSRERMKRIEEGIKELGSQILKEHPVENTQLQNEKLYLYYLQNGRDMYVDQELDINRLSDYDVDAIVPQSFLKDDSIDNKVLTRSDKNRGKSDNVPSEEVVKKMKNYWRQLLNAKLITQRKFDNLTKAERGGLSELDKAGFIKRQLVETRQITKHVAQILDSRMNTKYDENDKLIREVKVITLKSKLVSDFRKDFQFYKVREINNYHHAHDAYLNAVVGTALIKKYPKLESEFVYGDYKVYDVRKMIAKSEQEIGKATAKYFFYSNIMNFFKTEITLANGEIRKRPLIETNGETGEIVWDKGRDFATVRKVLSMPQVNIVKKTEVQTGGFSKESILPKRNSDKLIARKKDWDPKKYGGFDSPTVAYSVLVVAKVEKGKSKKLKSVKELLGITIMERSSFEKNPIDFLEAKGYKEVKKDLIIKLPKYSLFELENGRKRMLASAGELQKGNELALPSKYVNFLYLASHYEKLKGSPEDNEQKQLFVEQHKHYLDEIIEQISEFSKRVILADANLDKVLSAYNKHRDKPIREQAENIIHLFTLTNLGAPAAFKYFDTTIDRKRYTSTKEVLDATLIHQSITGLYETRIDLSQLGGDSGGSSGGSSGSETPGTSESATPESSGGSSGGSSAGMPGFVSAWRSEQPPRVVRVLTRPPFQRPPPPWLHDVALPQLPTLGDLAAWLDIEPGDLGWFADRWRVPTRGAATPLHHYAYKAIEKRDGRCRIIEIPKPRLRALQRKVLSGLLDRIPAHESVHGFRHGRNIVTFAAPHVGKAVVMRFDLTDFFASVHAGRVYSAFYALGYPQAVARALTALCTNRIPSGRLLAPDVRERIDWRERQRYRNRHLPQGAPTSPALANLCAFRLDLRLAGLARSVGATYTRYADDLAFSGDEELARMADRLCIRVAAIALEEGFGVNLRKTRVMRRSARQHLAGVVVNSHANVARPEFDALKAVLTNCVRHGWRSQNRDDLADFRAHLAGRVAHVAMVNAVRGARLRAVFERIEWEEEKPLDASGGSKRTADGSEFEPKKKRKV

SEQ ID NO: 945 - protein, 1788 aa, synthetic construct
  REGION 1..1788: note = Description of Artificial Sequence: Synthetic polypeptide
MKRTADGSEFESPKKKRKVDKKYSIGLDIGTNSVGWAVITDEYKVPSKKFKVLGNTDRHSIKKNLIGALLFDSGETAEATRLKRTARRRYTRRKNRICYLQEIFSNEMAKVDDSFFHRLEESFLVEEDKKHERHPIFGNIVDEVAYHEKYPTIYHLRKKLVDSTDKADLRLIYLALAHMIKFRGHFLIEGDLNPDNSDVDKLFIQLVQTYNQLFEENPINASGVDAKAILSARLSKSRRLENLIAQLPGEKKNGLFGNLIALSLGLTPNFKSNFDLAEDAKLQLSKDTYDDDLDNLLAQIGDQYADLFLAAKNLSDAILLSDILRVNTEITKAPLSASMIKRYDEHHQDLTLLKALVRQQLPEKYKEIFFDQSKNGYAGYIDGGASQEEFYKFIKPILEKMDGTEELLVKLNREDLLRKQRTFDNGSIPHQIHLGELHAILRRQEDFYPFLKDNREKIEKILTFRIPYYVGPLARGNSRFAWMTRKSEETITPWNFEEVVDKGASAQSFIERMTNFDKNLPNEKVLPKHSLLYEYFTVYNELTKVKYVTEGMRKPAFLSGEQKKAIVDLLFKTNRKVTVKQLKEDYFKKIECFDSVEISGVEDRFNASLGTYHDLLKIIKDKDFLDNEENEDILEDIVLTLTLFEDREMIEERLKTYAHLFDDKVMKQLKRRRYTGWGRLSRKLINGIRDKQSGKTILDFLKSDGFANRNFMQLIHDDSLTFKEDIQKAQVSGQGDSLHEHIANLAGSPAIKKGILQTVKVVDELVKVMGRHKPENIVIEMARENQTTQKGQKNSRERMKRIEEGIKELGSQILKEHPVENTQLQNEKLYLYYLQNGRDMYVDQELDINRLSDYDVDAIVPQSFLKDDSIDNKVLTRSDKNRGKSDNVPSEEVVKKMKNYWRQLLNAKLITQRKFDNLTKAERGGLSELDKAGFIKRQLVETRQITKHVAQILDSRMNTKYDENDKLIREVKVITLKSKLVSDFRKDFQFYKVREINNYHHAHDAYLNAVVGTALIKKYPKLESEFVYGDYKVYDVRKMIAKSEQEIGKATAKYFFYSNIMNFFKTEITLANGEIRKRPLIETNGETGEIVWDKGRDFATVRKVLSMPQVNIVKKTEVQTGGFSKESILPKRNSDKLIARKKDWDPKKYGGFDSPTVAYSVLVVAKVEKGKSKKLKSVKELLGITIMERSSFEKNPIDFLEAKGYKEVKKDLIIKLPKYSLFELENGRKRMLASAGELQKGNELALPSKYVNFLYLASHYEKLKGSPEDNEQKQLFVEQHKHYLDEIIEQISEFSKRVILADANLDKVLSAYNKHRDKPIREQAENIIHLFTLTNLGAPAAFKYFDTTIDRKRYTSTKEVLDATLIHQSITGLYETRIDLSQLGGDSGGSSGGSSGSETPGTSESATPESSGGSSGGSSEWIEYREQFITTAKKASKNSGYIKKNLKYAEKLYNQKLPIIYNASHFSKLVGYSLQYLYAASNDSSKFYREFEIKKKNGGSRKISEPLPSLKEIQKWILENILNKIQKEKVSKYAKAYQKKISIKENVKFHRGQKKVLSLDITNFFLNIKIDKIYEVFYNLGYSKSLSTLFSNLCTLNYSLPQGAPTSPILSNIVMLNFDNEIEKIVLEKRIRYTRYADDMTFSGDFLEKEIIKYVKENLNKIGLKINNKKTRVRKNWQQQMVTGIIVNEKIQISRKKRDELRQTMYYIEKYGIDSFLKYKGIKNKVYYLSHLKGILEYAYFINKNDKKLFNYIEYLKNNFFKEKSSISGGSKRTADGSEFEPKKKRKV

SEQ ID NO: 946 - protein, 1820 aa, synthetic construct
  REGION 1..1820: note = Description of Artificial Sequence: Synthetic polypeptide
MKRTADGSEFESPKKKRKVDKKYSIGLDIGTNSVGWAVITDEYKVPSKKFKVLGNTDRHSIKKNLIGALLFDSGETAEATRLKRTARRRYTRRKNRICYLQEIFSNEMAKVDDSFFHRLEESFLVEEDKKHERHPIFGNIVDEVAYHEKYPTIYHLRKKLVDSTDKADLRLIYLALAHMIKFRGHFLIEGDLNPDNSDVDKLFIQLVQTYNQLFEENPINASGVDAKAILSARLSKSRRLENLIAQLPGEKKNGLFGNLIALSLGLTPNFKSNFDLAEDAKLQLSKDTYDDDLDNLLAQIGDQYADLFLAAKNLSDAILLSDILRVNTEITKAPLSASMIKRYDEHHQDLTLLKALVRQQLPEKYKEIFFDQSKNGYAGYIDGGASQEEFYKFIKPILEKMDGTEELLVKLNREDLLRKQRTFDNGSIPHQIHLGELHAILRRQEDFYPFLKDNREKIEKILTFRIPYYVGPLARGNSRFAWMTRKSEETITPWNFEEVVDKGASAQSFIERMTNFDKNLPNEKVLPKHSLLYEYFTVYNELTKVKYVTEGMRKPAFLSGEQKKAIVDLLFKTNRKVTVKQLKEDYFKKIECFDSVEISGVEDRFNASLGTYHDLLKIIKDKDFLDNEENEDILEDIVLTLTLFEDREMIEERLKTYAHLFDDKVMKQLKRRRYTGWGRLSRKLINGIRDKQSGKTILDFLKSDGFANRNFMQLIHDDSLTFKEDIQKAQVSGQGDSLHEHIANLAGSPAIKKGILQTVKVVDELVKVMGRHKPENIVIEMARENQTTQKGQKNSRERMKRIEEGIKELGSQILKEHPVENTQLQNEKLYLYYLQNGRDMYVDQELDINRLSDYDVDAIVPQSFLKDDSIDNKVLTRSDKNRGKSDNVPSEEVVKKMKNYWRQLLNAKLITQRKFDNLTKAERGGLSELDKAGFIKRQLVETRQITKHVAQILDSRMNTKYDENDKLIREVKVITLKSKLVSDFRKDFQFYKVREINNYHHAHDAYLNAVVGTALIKKYPKLESEFVYGDYKVYDVRKMIAKSEQEIGKATAKYFFYSNIMNFFKTEITLANGEIRKRPLIETNGETGEIVWDKGRDFATVRKVLSMPQVNIVKKTEVQTGGFSKESILPKRNSDKLIARKKDWDPKKYGGFDSPTVAYSVLVVAKVEKGKSKKLKSVKELLGITIMERSSFEKNPIDFLEAKGYKEVKKDLIIKLPKYSLFELENGRKRMLASAGELQKGNELALPSKYVNFLYLASHYEKLKGSPEDNEQKQLFVEQHKHYLDEIIEQISEFSKRVILADANLDKVLSAYNKHRDKPIREQAENIIHLFTLTNLGAPAAFKYFDTTIDRKRYTSTKEVLDATLIHQSITGLYETRIDLSQLGGDSGGSSGGSSGSETPGTSESATPESSGGSSGGSSNRWSSRAFKKHNSDKPAAVVETAALYGRKIQTSCPELPVIFTLNHLALKSGVPYNNLRSFVDRTIERPYRSFTLRKNGLGSNPRKFRVIKVPQQDLKKAQQFINQNILSKMEPHECSVAFSPGSKIYDAASEHCNARWLLKFDIVSFFESITEKSVYRVFRRYNYPALLSFEMARICTALKARPPINWGGAPPNIRYRTIPGYSNKNLGTLPQGAPTSPMLANLVSYNLDRRLKLIADAYNCHYSRYADDITFSTDSSLSRGEVSRIIAMINSTLREYGHTMNKAKTTIAPPGARKFYLGMNIHGDSPQLRKSFKRKLKQHLFFCEKNSVGPEKHSKHLGFVSVIGFKNHLRGLINYANQVDTVFGENCMKRFQSIDWPLSGGSKRTADGSEFEPKKKRKV

SEQ ID NO: 947 - protein, 1778 aa, synthetic construct
  REGION 1..1778: note = Description of Artificial Sequence: Synthetic polypeptide
MKRTADGSEFESPKKKRKVDKKYSIGLDIGTNSVGWAVITDEYKVPSKKFKVLGNTDRHSIKKNLIGALLFDSGETAEATRLKRTARRRYTRRKNRICYLQEIFSNEMAKVDDSFFHRLEESFLVEEDKKHERHPIFGNIVDEVAYHEKYPTIYHLRKKLVDSTDKADLRLIYLALAHMIKFRGHFLIEGDLNPDNSDVDKLFIQLVQTYNQLFEENPINASGVDAKAILSARLSKSRRLENLIAQLPGEKKNGLFGNLIALSLGLTPNFKSNFDLAEDAKLQLSKDTYDDDLDNLLAQIGDQYADLFLAAKNLSDAILLSDILRVNTEITKAPLSASMIKRYDEHHQDLTLLKALVRQQLPEKYKEIFFDQSKNGYAGYIDGGASQEEFYKFIKPILEKMDGTEELLVKLNREDLLRKQRTFDNGSIPHQIHLGELHAILRRQEDFYPFLKDNREKIEKILTFRIPYYVGPLARGNSRFAWMTRKSEETITPWNFEEVVDKGASAQSFIERMTNFDKNLPNEKVLPKHSLLYEYFTVYNELTKVKYVTEGMRKPAFLSGEQKKAIVDLLFKTNRKVTVKQLKEDYFKKIECFDSVEISGVEDRFNASLGTYHDLLKIIKDKDFLDNEENEDILEDIVLTLTLFEDREMIEERLKTYAHLFDDKVMKQLKRRRYTGWGRLSRKLINGIRDKQSGKTILDFLKSDGFANRNFMQLIHDDSLTFKEDIQKAQVSGQGDSLHEHIANLAGSPAIKKGILQTVKVVDELVKVMGRHKPENIVIEMARENQTTQKGQKNSRERMKRIEEGIKELGSQILKEHPVENTQLQNEKLYLYYLQNGRDMYVDQELDINRLSDYDVDAIVPQSFLKDDSIDNKVLTRSDKNRGKSDNVPSEEVVKKMKNYWRQLLNAKLITQRKFDNLTKAERGGLSELDKAGFIKRQLVETRQITKHVAQILDSRMNTKYDENDKLIREVKVITLKSKLVSDFRKDFQFYKVREINNYHHAHDAYLNAVVGTALIKKYPKLESEFVYGDYKVYDVRKMIAKSEQEIGKATAKYFFYSNIMNFFKTEITLANGEIRKRPLIETNGETGEIVWDKGRDFATVRKVLSMPQVNIVKKTEVQTGGFSKESILPKRNSDKLIARKKDWDPKKYGGFDSPTVAYSVLVVAKVEKGKSKKLKSVKELLGITIMERSSFEKNPIDFLEAKGYKEVKKDLIIKLPKYSLFELENGRKRMLASAGELQKGNELALPSKYVNFLYLASHYEKLKGSPEDNEQKQLFVEQHKHYLDEIIEQISEFSKRVILADANLDKVLSAYNKHRDKPIREQAENIIHLFTLTNLGAPAAFKYFDTTIDRKRYTSTKEVLDATLIHQSITGLYETRIDLSQLGGDSGGSSGGSSGSETPGTSESATPESSGGSSGGSSFTQEHLHFAWLQVCAGSKTAGVDGISVELFESMATEQLQNLVYQLNNETYTASPAKGFYIPKKNGDKRLVGIPTVRDRIIQRLLLDELYFPLEGTFLDCSYAYRPGHNILQAVQHLYGYYQYQPKWIIKADVADFFDNLSWALLLTFLEKLSLEPSVLQLIEQQLQSGMIIAGQYRNFGKGVLQGGILSGALANLYLTNFDKKCLSQGINLVRYGDDFVIACNSWQEANRILDKITVWLGEVYLTLQSEKTQIFTPNDEFTFLGYRFAGGEVYAPPPPKPVLKGEWVINDSGNPYFRTKPRPKKPVSHPPKACSIDKPINFPRASLSHYWQETMTTKLSGGSKRTADGSEFEPKKKRKV

SEQ ID NO: 948 - protein, 1795 aa, synthetic construct
  REGION 1..1795: note = Description of Artificial Sequence: Synthetic polypeptide
MKRTADGSEFESPKKKRKVDKKYSIGLDIGTNSVGWAVITDEYKVPSKKFKVLGNTDRHSIKKNLIGALLFDSGETAEATRLKRTARRRYTRRKNRICYLQEIFSNEMAKVDDSFFHRLEESFLVEEDKKHERHPIFGNIVDEVAYHEKYPTIYHLRKKLVDSTDKADLRLIYLALAHMIKFRGHFLIEGDLNPDNSDVDKLFIQLVQTYNQLFEENPINASGVDAKAILSARLSKSRRLENLIAQLPGEKKNGLFGNLIALSLGLTPNFKSNFDLAEDAKLQLSKDTYDDDLDNLLAQIGDQYADLFLAAKNLSDAILLSDILRVNTEITKAPLSASMIKRYDEHHQDLTLLKALVRQQLPEKYKEIFFDQSKNGYAGYIDGGASQEEFYKFIKPILEKMDGTEELLVKLNREDLLRKQRTFDNGSIPHQIHLGELHAILRRQEDFYPFLKDNREKIEKILTFRIPYYVGPLARGNSRFAWMTRKSEETITPWNFEEVVDKGASAQSFIERMTNFDKNLPNEKVLPKHSLLYEYFTVYNELTKVKYVTEGMRKPAFLSGEQKKAIVDLLFKTNRKVTVKQLKEDYFKKIECFDSVEISGVEDRFNASLGTYHDLLKIIKDKDFLDNEENEDILEDIVLTLTLFEDREMIEERLKTYAHLFDDKVMKQLKRRRYTGWGRLSRKLINGIRDKQSGKTILDFLKSDGFANRNFMQLIHDDSLTFKEDIQKAQVSGQGDSLHEHIANLAGSPAIKKGILQTVKVVDELVKVMGRHKPENIVIEMARENQTTQKGQKNSRERMKRIEEGIKELGSQILKEHPVENTQLQNEKLYLYYLQNGRDMYVDQELDINRLSDYDVDAIVPQSFLKDDSIDNKVLTRSDKNRGKSDNVPSEEVVKKMKNYWRQLLNAKLITQRKFDNLTKAERGGLSELDKAGFIKRQLVETRQITKHVAQILDSRMNTKYDENDKLIREVKVITLKSKLVSDFRKDFQFYKVREINNYHHAHDAYLNAVVGTALIKKYPKLESEFVYGDYKVYDVRKMIAKSEQEIGKATAKYFFYSNIMNFFKTEITLANGEIRKRPLIETNGETGEIVWDKGRDFATVRKVLSMPQVNIVKKTEVQTGGFSKESILPKRNSDKLIARKKDWDPKKYGGFDSPTVAYSVLVVAKVEKGKSKKLKSVKELLGITIMERSSFEKNPIDFLEAKGYKEVKKDLIIKLPKYSLFELENGRKRMLASAGELQKGNELALPSKYVNFLYLASHYEKLKGSPEDNEQKQLFVEQHKHYLDEIIEQISEFSKRVILADANLDKVLSAYNKHRDKPIREQAENIIHLFTLTNLGAPAAFKYFDTTIDRKRYTSTKEVLDATLIHQSITGLYETRIDLSQLGGDSGGSSGGSSGSETPGTSESATPESSGGSSGGSSQYQLQDAYGYCSYPRPQAAKSLLEKSLSDASLHQACQTMYPRQANFDSSDTDEEHHDAIDELLTKLYVSRERIFKREFTPSQLHSVEIEKPEGGTRLLSVPNWHDRTLQKAVTECLGNTLEHIWMKHSYGYRKGHSRLQARDQINQYIQQGYEWVLESDIESFFDSVNWLNLEQRLKLLLPNEPLVPLLMQWVSAAKQTEDEQTLARHNGLPQGAPISPILANLLLDDLDQDMIAKGHQIVRYADDFVLLFKSKAAAESALDDIITALKEHHLAINLEKTRIVEASQGFRYLGYLFVDGYAIETKREYRKEHAQLDKQLNASSLENEPSLQQEPAVQNEQSTLIGEREKLGTLKLSGGSKRTADGSEFEPKKKRKV

SEQ ID NO: 949 - protein, 1832 aa, synthetic construct
  REGION 1..1832: note = Description of Artificial Sequence: Synthetic polypeptide
MKRTADGSEFESPKKKRKVDKKYSIGLDIGTNSVGWAVITDEYKVPSKKFKVLGNTDRHSIKKNLIGALLFDSGETAEATRLKRTARRRYTRRKNRICYLQEIFSNEMAKVDDSFFHRLEESFLVEEDKKHERHPIFGNIVDEVAYHEKYPTIYHLRKKLVDSTDKADLRLIYLALAHMIKFRGHFLIEGDLNPDNSDVDKLFIQLVQTYNQLFEENPINASGVDAKAILSARLSKSRRLENLIAQLPGEKKNGLFGNLIALSLGLTPNFKSNFDLAEDAKLQLSKDTYDDDLDNLLAQIGDQYADLFLAAKNLSDAILLSDILRVNTEITKAPLSASMIKRYDEHHQDLTLLKALVRQQLPEKYKEIFFDQSKNGYAGYIDGGASQEEFYKFIKPILEKMDGTEELLVKLNREDLLRKQRTFDNGSIPHQIHLGELHAILRRQEDFYPFLKDNREKIEKILTFRIPYYVGPLARGNSRFAWMTRKSEETITPWNFEEVVDKGASAQSFIERMTNFDKNLPNEKVLPKHSLLYEYFTVYNELTKVKYVTEGMRKPAFLSGEQKKAIVDLLFKTNRKVTVKQLKEDYFKKIECFDSVEISGVEDRFNASLGTYHDLLKIIKDKDFLDNEENEDILEDIVLTLTLFEDREMIEERLKTYAHLFDDKVMKQLKRRRYTGWGRLSRKLINGIRDKQSGKTILDFLKSDGFANRNFMQLIHDDSLTFKEDIQKAQVSGQGDSLHEHIANLAGSPAIKKGILQTVKVVDELVKVMGRHKPENIVIEMARENQTTQKGQKNSRERMKRIEEGIKELGSQILKEHPVENTQLQNEKLYLYYLQNGRDMYVDQELDINRLSDYDVDAIVPQSFLKDDSIDNKVLTRSDKNRGKSDNVPSEEVVKKMKNYWRQLLNAKLITQRKFDNLTKAERGGLSELDKAGFIKRQLVETRQITKHVAQILDSRMNTKYDENDKLIREVKVITLKSKLVSDFRKDFQFYKVREINNYHHAHDAYLNAVVGTALIKKYPKLESEFVYGDYKVYDVRKMIAKSEQEIGKATAKYFFYSNIMNFFKTEITLANGEIRKRPLIETNGETGEIVWDKGRDFATVRKVLSMPQVNIVKKTEVQTGGFSKESILPKRNSDKLIARKKDWDPKKYGGFDSPTVAYSVLVVAKVEKGKSKKLKSVKELLGITIMERSSFEKNPIDFLEAKGYKEVKKDLIIKLPKYSLFELENGRKRMLASAGELQKGNELALPSKYVNFLYLASHYEKLKGSPEDNEQKQLFVEQHKHYLDEIIEQISEFSKRVILADANLDKVLSAYNKHRDKPIREQAENIIHLFTLTNLGAPAAFKYFDTTIDRKRYTSTKEVLDATLIHQSITGLYETRIDLSQLGGDSGGSSGGSSGSETPGTSESATPESSGGSSGGSSGWLYNQMAMPETIFQAWYKVASNDGRPGWDNKSIEDYSLQLEENLKALSQALLTGTYKQGPLMKLVLLKPDGKDRVLLIPGVMDRVAQTAAAIVLSPIIEAELGNCTFAYRPGISREGAAREIDRLHREGYQWVLDADIRSFFDNVRHDLLFQRLVELIDDKEMISLLHRWLTAEIVDGINPRIQNTMGLPQGCPISPALANLYLDRFDETMEKEGFKLVRFADDYLVLCKTRPKAEAALKLSETALAELKLELHSDKTRITTFAEGFKYLGYLFIRALVIPTKMHPEEWYDKLGKFKLRKKSEHALPSDPDAMTGETAKFELETDQGEKIELTKNELLQTEFGCKLLESLDKKQLSVDEFLEKVARQDEERQKEKRDALKKLYSPFLNTKLSGGSKRTADGSEFEPKKKRKV

SEQ ID NO: 950 - protein, 1866 aa, synthetic construct
  REGION 1..1866: note = Description of Artificial Sequence: Synthetic polypeptide
MKRTADGSEFESPKKKRKVDKKYSIGLDIGTNSVGWAVITDEYKVPSKKFKVLGNTDRHSIKKNLIGALLFDSGETAEATRLKRTARRRYTRRKNRICYLQEIFSNEMAKVDDSFFHRLEESFLVEEDKKHERHPIFGNIVDEVAYHEKYPTIYHLRKKLVDSTDKADLRLIYLALAHMIKFRGHFLIEGDLNPDNSDVDKLFIQLVQTYNQLFEENPINASGVDAKAILSARLSKSRRLENLIAQLPGEKKNGLFGNLIALSLGLTPNFKSNFDLAEDAKLQLSKDTYDDDLDNLLAQIGDQYADLFLAAKNLSDAILLSDILRVNTEITKAPLSASMIKRYDEHHQDLTLLKALVRQQLPEKYKEIFFDQSKNGYAGYIDGGASQEEFYKFIKPILEKMDGTEELLVKLNREDLLRKQRTFDNGSIPHQIHLGELHAILRRQEDFYPFLKDNREKIEKILTFRIPYYVGPLARGNSRFAWMTRKSEETITPWNFEEVVDKGASAQSFIERMTNFDKNLPNEKVLPKHSLLYEYFTVYNELTKVKYVTEGMRKPAFLSGEQKKAIVDLLFKTNRKVTVKQLKEDYFKKIECFDSVEISGVEDRFNASLGTYHDLLKIIKDKDFLDNEENEDILEDIVLTLTLFEDREMIEERLKTYAHLFDDKVMKQLKRRRYTGWGRLSRKLINGIRDKQSGKTILDFLKSDGFANRNFMQLIHDDSLTFKEDIQKAQVSGQGDSLHEHIANLAGSPAIKKGILQTVKVVDELVKVMGRHKPENIVIEMARENQTTQKGQKNSRERMKRIEEGIKELGSQILKEHPVENTQLQNEKLYLYYLQNGRDMYVDQELDINRLSDYDVDAIVPQSFLKDDSIDNKVLTRSDKNRGKSDNVPSEEVVKKMKNYWRQLLNAKLITQRKFDNLTKAERGGLSELDKAGFIKRQLVETRQITKHVAQILDSRMNTKYDENDKLIREVKVITLKSKLVSDFRKDFQFYKVREINNYHHAHDAYLNAVVGTALIKKYPKLESEFVYGDYKVYDVRKMIAKSEQEIGKATAKYFFYSNIMNFFKTEITLANGEIRKRPLIETNGETGEIVWDKGRDFATVRKVLSMPQVNIVKKTEVQTGGFSKESILPKRNSDKLIARKKDWDPKKYGGFDSPTVAYSVLVVAKVEKGKSKKLKSVKELLGITIMERSSFEKNPIDFLEAKGYKEVKKDLIIKLPKYSLFELENGRKRMLASAGELQKGNELALPSKYVNFLYLASHYEKLKGSPEDNEQKQLFVEQHKHYLDEIIEQISEFSKRVILADANLDKVLSAYNKHRDKPIREQAENIIHLFTLTNLGAPAAFKYFDTTIDRKRYTSTKEVLDATLIHQSITGLYETRIDLSQLGGDSGGSSGGSSGSETPGTSESATPESSGGSSGGSSDTSNLMEQILSSDNLNRAYLQVVRNKGAEGVDGMKYTELKEHLAKNGETIKGQLRTRKYKPQPARRVEIPKPDGGVRNLGVPTVTDRFIQQAIAQVLTPIYEEQFHDHSYGFRPNRCAQQAILTALNIMNDGNDWIVDIDLEKFFDTVNHDKLMTLIGRTIKDGDVISIVRKYLVSGIMIDDEYEDSIVGTPQGGNLSPLLANIMLNELDKEMEKRGLNFVRYADDCIIMVGSEMSANRVMRNISRFIEEKLGLKVNMTKSKVDRPSGLKYLGFGFYFDPRAHQFKAKPHAKSVAKFKKRMKELTCRSWGVSNSYKVEKLNQLIRGWINYFKIGSMKTLCKELDSRIRYRLRMCIWKQWKTPQNQEKNLVKLGIDRNTARRVAYTGKRIAYVCNKGAVNVAISNKRLASFGLISMLDYYIEKCVTCSGGSKRTADGSEFEPKKKRKV

SEQ ID NO: 951 - protein, 1909 aa, synthetic construct
  REGION 1..1909: note = Description of Artificial Sequence: Synthetic polypeptide
MKRTADGSEFESPKKKRKVDKKYSIGLDIGTNSVGWAVITDEYKVPSKKFKVLGNTDRHSIKKNLIGALLFDSGETAEATRLKRTARRRYTRRKNRICYLQEIFSNEMAKVDDSFFHRLEESFLVEEDKKHERHPIFGNIVDEVAYHEKYPTIYHLRKKLVDSTDKADLRLIYLALAHMIKFRGHFLIEGDLNPDNSDVDKLFIQLVQTYNQLFEENPINASGVDAKAILSARLSKSRRLENLIAQLPGEKKNGLFGNLIALSLGLTPNFKSNFDLAEDAKLQLSKDTYDDDLDNLLAQIGDQYADLFLAAKNLSDAILLSDILRVNTEITKAPLSASMIKRYDEHHQDLTLLKALVRQQLPEKYKEIFFDQSKNGYAGYIDGGASQEEFYKFIKPILEKMDGTEELLVKLNREDLLRKQRTFDNGSIPHQIHLGELHAILRRQEDFYPFLKDNREKIEKILTFRIPYYVGPLARGNSRFAWMTRKSEETITPWNFEEVVDKGASAQSFIERMTNFDKNLPNEKVLPKHSLLYEYFTVYNELTKVKYVTEGMRKPAFLSGEQKKAIVDLLFKTNRKVTVKQLKEDYFKKIECFDSVEISGVEDRFNASLGTYHDLLKIIKDKDFLDNEENEDILEDIVLTLTLFEDREMIEERLKTYAHLFDDKVMKQLKRRRYTGWGRLSRKLINGIRDKQSGKTILDFLKSDGFANRNFMQLIHDDSLTFKEDIQKAQVSGQGDSLHEHIANLAGSPAIKKGILQTVKVVDELVKVMGRHKPENIVIEMARENQTTQKGQKNSRERMKRIEEGIKELGSQILKEHPVENTQLQNEKLYLYYLQNGRDMYVDQELDINRLSDYDVDAIVPQSFLKDDSIDNKVLTRSDKNRGKSDNVPSEEVVKKMKNYWRQLLNAKLITQRKFDNLTKAERGGLSELDKAGFIKRQLVETRQITKHVAQILDSRMNTKYDENDKLIREVKVITLKSKLVSDFRKDFQFYKVREINNYHHAHDAYLNAVVGTALIKKYPKLESEFVYGDYKVYDVRKMIAKSEQEIGKATAKYFFYSNIMNFFKTEITLANGEIRKRPLIETNGETGEIVWDKGRDFATVRKVLSMPQVNIVKKTEVQTGGFSKESILPKRNSDKLIARKKDWDPKKYGGFDSPTVAYSVLVVAKVEKGKSKKLKSVKELLGITIMERSSFEKNPIDFLEAKGYKEVKKDLIIKLPKYSLFELENGRKRMLASAGELQKGNELALPSKYVNFLYLASHYEKLKGSPEDNEQKQLFVEQHKHYLDEIIEQISEFSKRVILADANLDKVLSAYNKHRDKPIREQAENIIHLFTLTNLGAPAAFKYFDTTIDRKRYTSTKEVLDATLIHQSITGLYETRIDLSQLGGDSGGSSGGSSGSETPGTSESATPESSGGSSGGSSDSKDMQRLQTTQQRGYPLDREMEFQKTTEVHSISSASRDGRNEVQRYTSKMLEMIVERGNMRAAYKRVVANKGSHGVDGMEVDELLPYLKENWPTIKQQLLEGKYKPQPVRRVEIPKPDGGVRLLGIPTALDRLIQQAIAQILNRVYNHTFSDSSYGFRPGRSAKDAIKAAEAYINEGYTWVVDMDLEKFFDRVNHDIIMSKLEKRIGDKRVLKLIRRYLESGVMINGVKVSTEEGTPQGGPLSPLLANIMLDELDKELEKRGHKFCRYADDCNIYVKSRSAGNRVMKSIKKFIESKLKLKVNEAKSAVDRPWRRKFLGFSFYTKENEVRIRIHEKSIKRFKEKVREITNRNKGISMENRIKRLNQITTGWVNYFGLADAKSIMKTLDEWIRRRLRACIWKQWKKIKTKHDNLVKLGVEEQKAWEYANTRKGYWRISNSPILNKTLTNKYFESIGYKSLSQRYLIVHNSSGGSKRTADGSEFEPKKKRKV

SEQ ID NO: 952 - protein, 1707 aa, synthetic construct
  REGION 1..1707: note = Description of Artificial Sequence: Synthetic polypeptide
MKRTADGSEFESPKKKRKVDKKYSIGLDIGTNSVGWAVITDEYKVPSKKFKVLGNTDRHSIKKNLIGALLFDSGETAEATRLKRTARRRYTRRKNRICYLQEIFSNEMAKVDDSFFHRLEESFLVEEDKKHERHPIFGNIVDEVAYHEKYPTIYHLRKKLVDSTDKADLRLIYLALAHMIKFRGHFLIEGDLNPDNSDVDKLFIQLVQTYNQLFEENPINASGVDAKAILSARLSKSRRLENLIAQLPGEKKNGLFGNLIALSLGLTPNFKSNFDLAEDAKLQLSKDTYDDDLDNLLAQIGDQYADLFLAAKNLSDAILLSDILRVNTEITKAPLSASMIKRYDEHHQDLTLLKALVRQQLPEKYKEIFFDQSKNGYAGYIDGGASQEEFYKFIKPILEKMDGTEELLVKLNREDLLRKQRTFDNGSIPHQIHLGELHAILRRQEDFYPFLKDNREKIEKILTFRIPYYVGPLARGNSRFAWMTRKSEETITPWNFEEVVDKGASAQSFIERMTNFDKNLPNEKVLPKHSLLYEYFTVYNELTKVKYVTEGMRKPAFLSGEQKKAIVDLLFKTNRKVTVKQLKEDYFKKIECFDSVEISGVEDRFNASLGTYHDLLKIIKDKDFLDNEENEDILEDIVLTLTLFEDREMIEERLKTYAHLFDDKVMKQLKRRRYTGWGRLSRKLINGIRDKQSGKTILDFLKSDGFANRNFMQLIHDDSLTFKEDIQKAQVSGQGDSLHEHIANLAGSPAIKKGILQTVKVVDELVKVMGRHKPENIVIEMARENQTTQKGQKNSRERMKRIEEGIKELGSQILKEHPVENTQLQNEKLYLYYLQNGRDMYVDQELDINRLSDYDVDAIVPQSFLKDDSIDNKVLTRSDKNRGKSDNVPSEEVVKKMKNYWRQLLNAKLITQRKFDNLTKAERGGLSELDKAGFIKRQLVETRQITKHVAQILDSRMNTKYDENDKLIREVKVITLKSKLVSDFRKDFQFYKVREINNYHHAHDAYLNAVVGTALIKKYPKLESEFVYGDYKVYDVRKMIAKSEQEIGKATAKYFFYSNIMNFFKTEITLANGEIRKRPLIETNGETGEIVWDKGRDFATVRKVLSMPQVNIVKKTEVQTGGFSKESILPKRNSDKLIARKKDWDPKKYGGFDSPTVAYSVLVVAKVEKGKSKKLKSVKELLGITIMERSSFEKNPIDFLEAKGYKEVKKDLIIKLPKYSLFELENGRKRMLASAGELQKGNELALPSKYVNFLYLASHYEKLKGSPEDNEQKQLFVEQHKHYLDEIIEQISEFSKRVILADANLDKVLSAYNKHRDKPIREQAENIIHLFTLTNLGAPAAFKYFDTTIDRKRYTSTKEVLDATLIHQSITGLYETRIDLSQLGGDSGGSSGGSSGSETPGTSESATPESSGGSSGGSSRAAGIDGITVDLFTGIAREQIHQLYRQMRQERYVARPAKGFYLAKQKGGHRLIGIPTVRDRIVQRYLLQSIYPSLENAFSDAVFAYRPGLSIYAAVKRVMERYRYQPTWVIKADIQQFFDQLSWPLLLHQLDQLSLPATWVQWIEQQLKAGIVVSGQFYQPGQGVLPGSILSGALANLYLNDFDRHCLEADIPLVRYGDDCVAVCQSYLEASRSLALMQDWIEGLSLSFHPEKTTIIPPGQAFVFLGHRFRNGTVEGPARQKAEGRRSGGSKRTADGSEFEPKKKRKV

SEQ ID NO: 953 - protein, 1779 aa, synthetic construct
  REGION 1..1779: note = Description of Artificial Sequence: Synthetic polypeptide
MKRTADGSEFESPKKKRKVDKKYSIGLDIGTNSVGWAVITDEYKVPSKKFKVLGNTDRHSIKKNLIGALLFDSGETAEATRLKRTARRRYTRRKNRICYLQEIFSNEMAKVDDSFFHRLEESFLVEEDKKHERHPIFGNIVDEVAYHEKYPTIYHLRKKLVDSTDKADLRLIYLALAHMIKFRGHFLIEGDLNPDNSDVDKLFIQLVQTYNQLFEENPINASGVDAKAILSARLSKSRRLENLIAQLPGEKKNGLFGNLIALSLGLTPNFKSNFDLAEDAKLQLSKDTYDDDLDNLLAQIGDQYADLFLAAKNLSDAILLSDILRVNTEITKAPLSASMIKRYDEHHQDLTLLKALVRQQLPEKYKEIFFDQSKNGYAGYIDGGASQEEFYKFIKPILEKMDGTEELLVKLNREDLLRKQRTFDNGSIPHQIHLGELHAILRRQEDFYPFLKDNREKIEKILTFRIPYYVGPLARGNSRFAWMTRKSEETITPWNFEEVVDKGASAQSFIERMTNFDKNLPNEKVLPKHSLLYEYFTVYNELTKVKYVTEGMRKPAFLSGEQKKAIVDLLFKTNRKVTVKQLKEDYFKKIECFDSVEISGVEDRFNASLGTYHDLLKIIKDKDFLDNEENEDILEDIVLTLTLFEDREMIEERLKTYAHLFDDKVMKQLKRRRYTGWGRLSRKLINGIRDKQSGKTILDFLKSDGFANRNFMQLIHDDSLTFKEDIQKAQVSGQGDSLHEHIANLAGSPAIKKGILQTVKVVDELVKVMGRHKPENIVIEMARENQTTQKGQKNSRERMKRIEEGIKELGSQILKEHPVENTQLQNEKLYLYYLQNGRDMYVDQELDINRLSDYDVDAIVPQSFLKDDSIDNKVLTRSDKNRGKSDNVPSEEVVKKMKNYWRQLLNAKLITQRKFDNLTKAERGGLSELDKAGFIKRQLVETRQITKHVAQILDSRMNTKYDENDKLIREVKVITLKSKLVSDFRKDFQFYKVREINNYHHAHDAYLNAVVGTALIKKYPKLESEFVYGDYKVYDVRKMIAKSEQEIGKATAKYFFYSNIMNFFKTEITLANGEIRKRPLIETNGETGEIVWDKGRDFATVRKVLSMPQVNIVKKTEVQTGGFSKESILPKRNSDKLIARKKDWDPKKYGGFDSPTVAYSVLVVAKVEKGKSKKLKSVKELLGITIMERSSFEKNPIDFLEAKGYKEVKKDLIIKLPKYSLFELENGRKRMLASAGELQKGNELALPSKYVNFLYLASHYEKLKGSPEDNEQKQLFVEQHKHYLDEIIEQISEFSKRVILADANLDKVLSAYNKHRDKPIREQAENIIHLFTLTNLGAPAAFKYFDTTIDRKRYTSTKEVLDATLIHQSITGLYETRIDLSQLGGDSGGSSGGSSGSETPGTSESATPESSGGSSGGSSWFADEPRHTRGGSRMADLYRQVRLMKTLSSAWRVVRASCMQSSSSEIRNEAIEFEADSFRQLKSIQSKLQKKKFEFLPQHGIAKKRPGKSSRPLVIAPIPNRIVQRAILDVLQDNVAYVQEILKVETSFGGIKGKNVALAIAAINKAFSNGVTHYVRSDIPSFFTKVQRAKVVDALAKNIDDVDMVNLFSAAIETTLGNLTDLQRRGLESIFPLSHDGVAQGSPLSPLIANIYLAEFDREMNREGLACIRYIDDFVIMAASEKQVMKGFRAAKAVLRRQGLQVYSPDDDPLKASKGDVRDGFDFLGCYVKPGLVQPSKFARNRLLEKIDSGGSKRTADGSGGSKRTADGSEFEPKKKRKV

SEQ ID NO: 954 - protein, 1867 aa, synthetic construct
  REGION 1..1867: note = Description of Artificial Sequence: Synthetic polypeptide
MKRTADGSEFESPKKKRKVDKKYSIGLDIGTNSVGWAVITDEYKVPSKKFKVLGNTDRHSIKKNLIGALLFDSGETAEATRLKRTARRRYTRRKNRICYLQEIFSNEMAKVDDSFFHRLEESFLVEEDKKHERHPIFGNIVDEVAYHEKYPTIYHLRKKLVDSTDKADLRLIYLALAHMIKFRGHFLIEGDLNPDNSDVDKLFIQLVQTYNQLFEENPINASGVDAKAILSARLSKSRRLENLIAQLPGEKKNGLFGNLIALSLGLTPNFKSNFDLAEDAKLQLSKDTYDDDLDNLLAQIGDQYADLFLAAKNLSDAILLSDILRVNTEITKAPLSASMIKRYDEHHQDLTLLKALVRQQLPEKYKEIFFDQSKNGYAGYIDGGASQEEFYKFIKPILEKMDGTEELLVKLNREDLLRKQRTFDNGSIPHQIHLGELHAILRRQEDFYPFLKDNREKIEKILTFRIPYYVGPLARGNSRFAWMTRKSEETITPWNFEEVVDKGASAQSFIERMTNFDKNLPNEKVLPKHSLLYEYFTVYNELTKVKYVTEGMRKPAFLSGEQKKAIVDLLFKTNRKVTVKQLKEDYFKKIECFDSVEISGVEDRFNASLGTYHDLLKIIKDKDFLDNEENEDILEDIVLTLTLFEDREMIEERLKTYAHLFDDKVMKQLKRRRYTGWGRLSRKLINGIRDKQSGKTILDFLKSDGFANRNFMQLIHDDSLTFKEDIQKAQVSGQGDSLHEHIANLAGSPAIKKGILQTVKVVDELVKVMGRHKPENIVIEMARENQTTQKGQKNSRERMKRIEEGIKELGSQILKEHPVENTQLQNEKLYLYYLQNGRDMYVDQELDINRLSDYDVDAIVPQSFLKDDSIDNKVLTRSDKNRGKSDNVPSEEVVKKMKNYWRQLLNAKLITQRKFDNLTKAERGGLSELDKAGFIKRQLVETRQITKHVAQILDSRMNTKYDENDKLIREVKVITLKSKLVSDFRKDFQFYKVREINNYHHAHDAYLNAVVGTALIKKYPKLESEFVYGDYKVYDVRKMIAKSEQEIGKATAKYFFYSNIMNFFKTEITLANGEIRKRPLIETNGETGEIVWDKGRDFATVRKVLSMPQVNIVKKTEVQTGGFSKESILPKRNSDKLIARKKDWDPKKYGGFDSPTVAYSVLVVAKVEKGKSKKLKSVKELLGITIMERSSFEKNPIDFLEAKGYKEVKKDLIIKLPKYSLFELENGRKRMLASAGELQKGNELALPSKYVNFLYLASHYEKLKGSPEDNEQKQLFVEQHKHYLDEIIEQISEFSKRVILADANLDKVLSAYNKHRDKPIREQAENIIHLFTLTNLGAPAAFKYFDTTIDRKRYTSTKEVLDATLIHQSITGLYETRIDLSQLGGDSGGSSGGSSGSETPGTSESATPESSGGSSGGSSQPLLQFPEGKVRNFQRKLYVKAKQEKTFRFYSLYDKLYREDVLQYAWQQCRANKGAPGADGQSFKDIEEKVGVERFLKEIAEELRNGTYRPMPVRRVYILKPDGSQRPLGIPTIKDRIAQMACLTVIQPIFEADFLDCSYGFRPKRNAHQAIGAITENIKQGFTAVYDADLTKCFDSIQHRLIMDSLAERITDGKVLRLIKGWLEAPIVEPGGPKQGRKNYQGTPQGGVISPLLANIVLNRLDRLWHRPGGPRERYNARLVRYADDFVVLARFIGEPIKNELESIITSMGLNLNEKKTRILDLNKGDILNFLGYSIRISRDKNRRITIKPSDKAIARLRDKIREIISRERLYHGLKGIIAEINPVLRGWKQYFKLTNVSRIFSGLNFYITARFYRVGRKTSQRYSKIFKPGVYVTLRKMGLYCLATDSGGSKRTADGSEFEPKKKRKV

SEQ ID NO: 955 - protein, 1859 aa, synthetic construct
  REGION 1..1859: note = Description of Artificial Sequence: Synthetic polypeptide
MKRTADGSEFESPKKKRKVDKKYSIGLDIGTNSVGWAVITDEYKVPSKKFKVLGNTDRHSIKKNLIGALLFDSGETAEATRLKRTARRRYTRRKNRICYLQEIFSNEMAKVDDSFFHRLEESFLVEEDKKHERHPIFGNIVDEVAYHEKYPTIYHLRKKLVDSTDKADLRLIYLALAHMIKFRGHFLIEGDLNPDNSDVDKLFIQLVQTYNQLFEENPINASGVDAKAILSARLSKSRRLENLIAQLPGEKKNGLFGNLIALSLGLTPNFKSNFDLAEDAKLQLSKDTYDDDLDNLLAQIGDQYADLFLAAKNLSDAILLSDILRVNTEITKAPLSASMIKRYDEHHQDLTLLKALVRQQLPEKYKEIFFDQSKNGYAGYIDGGASQEEFYKFIKPILEKMDGTEELLVKLNREDLLRKQRTFDNGSIPHQIHLGELHAILRRQEDFYPFLKDNREKIEKILTFRIPYYVGPLARGNSRFAWMTRKSEETITPWNFEEVVDKGASAQSFIERMTNFDKNLPNEKVLPKHSLLYEYFTVYNELTKVKYVTEGMRKPAFLSGEQKKAIVDLLFKTNRKVTVKQLKEDYFKKIECFDSVEISGVEDRFNASLGTYHDLLKIIKDKDFLDNEENEDILEDIVLTLTLFEDREMIEERLKTYAHLFDDKVMKQLKRRRYTGWGRLSRKLINGIRDKQSGKTILDFLKSDGFANRNFMQLIHDDSLTFKEDIQKAQVSGQGDSLHEHIANLAGSPAIKKGILQTVKVVDELVKVMGRHKPENIVIEMARENQTTQKGQKNSRERMKRIEEGIKELGSQILKEHPVENTQLQNEKLYLYYLQNGRDMYVDQELDINRLSDYDVDAIVPQSFLKDDSIDNKVLTRSDKNRGKSDNVPSEEVVKKMKNYWRQLLNAKLITQRKFDNLTKAERGGLSELDKAGFIKRQLVETRQITKHVAQILDSRMNTKYDENDKLIREVKVITLKSKLVSDFRKDFQFYKVREINNYHHAHDAYLNAVVGTALIKKYPKLESEFVYGDYKVYDVRKMIAKSEQEIGKATAKYFFYSNIMNFFKTEITLANGEIRKRPLIETNGETGEIVWDKGRDFATVRKVLSMPQVNIVKKTEVQTGGFSKESILPKRNSDKLIARKKDWDPKKYGGFDSPTVAYSVLVVAKVEKGKSKKLKSVKELLGITIMERSSFEKNPIDFLEAKGYKEVKKDLIIKLPKYSLFELENGRKRMLASAGELQKGNELALPSKYVNFLYLASHYEKLKGSPEDNEQKQLFVEQHKHYLDEIIEQISEFSKRVILADANLDKVLSAYNKHRDKPIREQAENIIHLFTLTNLGAPAAFKYFDTTIDRKRYTSTKEVLDATLIHQSITGLYETRIDLSQLGGDSGGSSGGSSGSETPGTSESATPESSGGSSGGSSQETKPFGISKNVVMMAFERVKANKGTYGMDEQSIEMYEMDLKNNLYKLWNRMSSGSYFPKPVKAVAIPKKNGGTRTLGIPTVEDRVAQMVAKLYFEPNVERLFYEDSYGYRPNKSAIQAIEATRKRCWRKDWVLEFDIKGLFDNIRHDYLIEMVKRHTNQEWVTLYVQRWLITPFQMEDGTLIERTAGTPQGGVISPVLANLFLHYTFDDFMVKEFSSIPWARYADDGIAHCTSLKQAKYLQRRLEERFKLFGLELNLEKTKIAYCKDDDRQLSYPNTSFDFLGYTFRPRHAKNKHGKFFTNFSPAIADKAKKAIRKEVRSWRLQLKADKTLQDISNMFNKKIQGWINYYGHFYKSEMYSVLRYINSSLIKWVRRKYKKRKHRRKAEYWLGTIAQRERKLFAHWKYGILPATNNGSRMSSGGSKRTADGSEFEPKKKRKV

SEQ ID NO: 956 - protein, 1859 aa, synthetic construct
  REGION 1..1859: note = Description of Artificial Sequence: Synthetic polypeptide
MKRTADGSEFESPKKKRKVDKKYSIGLDIGTNSVGWAVITDEYKVPSKKFKVLGNTDRHSIKKNLIGALLFDSGETAEATRLKRTARRRYTRRKNRICYLQEIFSNEMAKVDDSFFHRLEESFLVEEDKKHERHPIFGNIVDEVAYHEKYPTIYHLRKKLVDSTDKADLRLIYLALAHMIKFRGHFLIEGDLNPDNSDVDKLFIQLVQTYNQLFEENPINASGVDAKAILSARLSKSRRLENLIAQLPGEKKNGLFGNLIALSLGLTPNFKSNFDLAEDAKLQLSKDTYDDDLDNLLAQIGDQYADLFLAAKNLSDAILLSDILRVNTEITKAPLSASMIKRYDEHHQDLTLLKALVRQQLPEKYKEIFFDQSKNGYAGYIDGGASQEEFYKFIKPILEKMDGTEELLVKLNREDLLRKQRTFDNGSIPHQIHLGELHAILRRQEDFYPFLKDNREKIEKILTFRIPYYVGPLARGNSRFAWMTRKSEETITPWNFEEVVDKGASAQSFIERMTNFDKNLPNEKVLPKHSLLYEYFTVYNELTKVKYVTEGMRKPAFLSGEQKKAIVDLLFKTNRKVTVKQLKEDYFKKIECFDSVEISGVEDRFNASLGTYHDLLKIIKDKDFLDNEENEDILEDIVLTLTLFEDREMIEERLKTYAHLFDDKVMKQLKRRRYTGWGRLSRKLINGIRDKQSGKTILDFLKSDGFANRNFMQLIHDDSLTFKEDIQKAQVSGQGDSLHEHIANLAGSPAIKKGILQTVKVVDELVKVMGRHKPENIVIEMARENQTTQKGQKNSRERMKRIEEGIKELGSQILKEHPVENTQLQNEKLYLYYLQNGRDMYVDQELDINRLSDYDVDAIVPQSFLKDDSIDNKVLTRSDKNRGKSDNVPSEEVVKKMKNYWRQLLNAKLITQRKFDNLTKAERGGLSELDKAGFIKRQLVETRQITKHVAQILDSRMNTKYDENDKLIREVKVITLKSKLVSDFRKDFQFYKVREINNYHHAHDAYLNAVVGTALIKKYPKLESEFVYGDYKVYDVRKMIAKSEQEIGKATAKYFFYSNIMNFFKTEITLANGEIRKRPLIETNGETGEIVWDKGRDFATVRKVLSMPQVNIVKKTEVQTGGFSKESILPKRNSDKLIARKKDWDPKKYGGFDSPTVAYSVLVVAKVEKGKSKKLKSVKELLGITIMERSSFEKNPIDFLEAKGYKEVKKDLIIKLPKYSLFELENGRKRMLASAGELQKGNELALPSKYVNFLYLASHYEKLKGSPEDNEQKQLFVEQHKHYLDEIIEQISEFSKRVILADANLDKVLSAYNKHRDKPIREQAENIIHLFTLTNLGAPAAFKYFDTTIDRKRYTSTKEVLDATLIHQSITGLYETRIDLSQLGGDSGGSSGGSSGSETPGTSESATPESSGGSSGGSSALLERILARDNLITALKRVEANQGAPGIDGVSTDQLRDYIRAHWSTIHAQLLAGTYRPAPVRRVEIPKPGGGTRQLGIPTVVDRLIQQAILQELTPIFDPDFSSSSFGFRPGRNAHDAVRQAQGYIQEGYRYVVDMDLEKFFDRVNHDILMSRVARKVKDKRVLKLIRAYLQAGVMIEGVKVQTEEGTPQGGPLSPLLANILLDDLDKELEKRGLKFCRYADDCNIYVKSLRAGQRVKQSIQRFLEKTLKLKVNEEKSAVDRPWKRAFLGFSFTPERKARIRLAPRSIQRLKQRIRQLTNPNWSISMPERIHRVNQYVMGWIGYFRLVETPSVLQTIEGWIRRRLRLCQWLQWKRVRTRIRELRALGLKETAVMEIANTRKGAWRTTKTPQLHQALGKTYWTAQGLKSLTQRYFELRQGSGGSKRTADGSEFEPKKKRKV

SEQ ID NO: 957 - protein, 1878 aa, synthetic construct
  REGION 1..1878: note = Description of Artificial Sequence: Synthetic polypeptide
MKRTADGSEFESPKKKRKVDKKYSIGLDIGTNSVGWAVITDEYKVPSKKFKVLGNTDRHSIKKNLIGALLFDSGETAEATRLKRTARRRYTRRKNRICYLQEIFSNEMAKVDDSFFHRLEESFLVEEDKKHERHPIFGNIVDEVAYHEKYPTIYHLRKKLVDSTDKADLRLIYLALAHMIKFRGHFLIEGDLNPDNSDVDKLFIQLVQTYNQLFEENPINASGVDAKAILSARLSKSRRLENLIAQLPGEKKNGLFGNLIALSLGLTPNFKSNFDLAEDAKLQLSKDTYDDDLDNLLAQIGDQYADLFLAAKNLSDAILLSDILRVNTEITKAPLSASMIKRYDEHHQDLTLLKALVRQQLPEKYKEIFFDQSKNGYAGYIDGGASQEEFYKFIKPILEKMDGTEELLVKLNREDLLRKQRTFDNGSIPHQIHLGELHAILRRQEDFYPFLKDNREKIEKILTFRIPYYVGPLARGNSRFAWMTRKSEETITPWNFEEVVDKGASAQSFIERMTNFDKNLPNEKVLPKHSLLYEYFTVYNELTKVKYVTEGMRKPAFLSGEQKKAIVDLLFKTNRKVTVKQLKEDYFKKIECFDSVEISGVEDRFNASLGTYHDLLKIIKDKDFLDNEENEDILEDIVLTLTLFEDREMIEERLKTYAHLFDDKVMKQLKRRRYTGWGRLSRKLINGIRDKQSGKTILDFLKSDGFANRNFMQLIHDDSLTFKEDIQKAQVSGQGDSLHEHIANLAGSPAIKKGILQTVKVVDELVKVMGRHKPENIVIEMARENQTTQKGQKNSRERMKRIEEGIKELGSQILKEHPVENTQLQNEKLYLYYLQNGRDMYVDQELDINRLSDYDVDAIVPQSFLKDDSIDNKVLTRSDKNRGKSDNVPSEEVVKKMKNYWRQLLNAKLITQRKFDNLTKAERGGLSELDKAGFIKRQLVETRQITKHVAQILDSRMNTKYDENDKLIREVKVITLKSKLVSDFRKDFQFYKVREINNYHHAHDAYLNAVVGTALIKKYPKLESEFVYGDYKVYDVRKMIAKSEQEIGKATAKYFFYSNIMNFFKTEITLANGEIRKRPLIETNGETGEIVWDKGRDFATVRKVLSMPQVNIVKKTEVQTGGFSKESILPKRNSDKLIARKKDWDPKKYGGFDSPTVAYSVLVVAKVEKGKSKKLKSVKELLGITIMERSSFEKNPIDFLEAKGYKEVKKDLIIKLPKYSLFELENGRKRMLASAGELQKGNELALPSKYVNFLYLASHYEKLKGSPEDNEQKQLFVEQHKHYLDEIIEQISEFSKRVILADANLDKVLSAYNKHRDKPIREQAENIIHLFTLTNLGAPAAFKYFDTTIDRKRYTSTKEVLDATLIHQSITGLYETRIDLSQLGGDSGGSSGGSSGSETPGTSESATPESSGGSSGGSSIAQKAINIFEKVQVFQRKIYLSTKADNKRKFGVLYDKVYRKDILKVAWFYVKRNKGSAGIDDFTIEEIEAYGVQKFLDEIEDQLRNKKYQPKAVKRVYIPKANGKKRPLGIPTVRDRVVQTAVKIVIEPIFEADFQEFSYGFRPKRSANQAIREIYKYLNYGCEWVIDADLKGYFDTIPHDKLLLLVKERVTDKSIIKLLSLWLEAGIMEDNQVRSNILGTPQGGVISPLLANIYLNALDRYWKNNRLEGRGHDAHLIRYADDFVILCSNNPKKYYQYAKQRIDKLGLTLNEEKTRIVHATEGFDFLGYTLRKSKSHKSGKYKTYYYPSRKSMKSIKGKVKDVIQTGQHLNLPDVMERLNPMLRGWANYFKAGNSKQHFKSIDNYVIYNLTIMLRKKHKKSGKGWREHPPSWYYNYFGLVCLRKLSTNINDDSQRYGRSGGSKRTADGSEFEPKKKRKV

SEQ ID NO: 958 - protein, 1873 aa, synthetic construct
  REGION 1..1873: note = Description of Artificial Sequence: Synthetic polypeptide
MKRTADGSEFESPKKKRKVDKKYSIGLDIGTNSVGWAVITDEYKVPSKKFKVLGNTDRHSIKKNLIGALLFDSGETAEATRLKRTARRRYTRRKNRICYLQEIFSNEMAKVDDSFFHRLEESFLVEEDKKHERHPIFGNIVDEVAYHEKYPTIYHLRKKLVDSTDKADLRLIYLALAHMIKFRGHFLIEGDLNPDNSDVDKLFIQLVQTYNQLFEENPINASGVDAKAILSARLSKSRRLENLIAQLPGEKKNGLFGNLIALSLGLTPNFKSNFDLAEDAKLQLSKDTYDDDLDNLLAQIGDQYADLFLAAKNLSDAILLSDILRVNTEITKAPLSASMIKRYDEHHQDLTLLKALVRQQLPEKYKEIFFDQSKNGYAGYIDGGASQEEFYKFIKPILEKMDGTEELLVKLNREDLLRKQRTFDNGSIPHQIHLGELHAILRRQEDFYPFLKDNREKIEKILTFRIPYYVGPLARGNSRFAWMTRKSEETITPWNFEEVVDKGASAQSFIERMTNFDKNLPNEKVLPKHSLLYEYFTVYNELTKVKYVTEGMRKPAFLSGEQKKAIVDLLFKTNRKVTVKQLKEDYFKKIECFDSVEISGVEDRFNASLGTYHDLLKIIKDKDFLDNEENEDILEDIVLTLTLFEDREMIEERLKTYAHLFDDKVMKQLKRRRYTGWGRLSRKLINGIRDKQSGKTILDFLKSDGFANRNFMQLIHDDSLTFKEDIQKAQVSGQGDSLHEHIANLAGSPAIKKGILQTVKVVDELVKVMGRHKPENIVIEMARENQTTQKGQKNSRERMKRIEEGIKELGSQILKEHPVENTQLQNEKLYLYYLQNGRDMYVDQELDINRLSDYDVDAIVPQSFLKDDSIDNKVLTRSDKNRGKSDNVPSEEVVKKMKNYWRQLLNAKLITQRKFDNLTKAERGGLSELDKAGFIKRQLVETRQITKHVAQILDSRMNTKYDENDKLIREVKVITLKSKLVSDFRKDFQFYKVREINNYHHAHDAYLNAVVGTALIKKYPKLESEFVYGDYKVYDVRKMIAKSEQEIGKATAKYFFYSNIMNFFKTEITLANGEIRKRPLIETNGETGEIVWDKGRDFATVRKVLSMPQVNIVKKTEVQTGGFSKESILPKRNSDKLIARKKDWDPKKYGGFDSPTVAYSVLVVAKVEKGKSKKLKSVKELLGITIMERSSFEKNPIDFLEAKGYKEVKKDLIIKLPKYSLFELENGRKRMLASAGELQKGNELALPSKYVNFLYLASHYEKLKGSPEDNEQKQLFVEQHKHYLDEIIEQISEFSKRVILADANLDKVLSAYNKHRDKPIREQAENIIHLFTLTNLGAPAAFKYFDTTIDRKRYTSTKEVLDATLIHQSITGLYETRIDLSQLGGDSGGSSGGSSGSETPGTSESATPESSGGSSGGSSVPPALWGSRHNQRRFLRNVKKFISLGKHAKLSPQELTWKMKVQDCAWLRGSPGACSVPAAEHRRREGVLARLLCWLMGTYVVELLRSFFYVTETTFQKNRLFFYRKSVWSPLQTLGVRQHCTSVRLRELSAAEVRRQHEARATLLTSRLRFLPKPGGLRPIVNMDYVAGARALCRDKKIQHLTSQVKTLFSVLNYERARRPRLLGASVLGMDDIHRAWHDFVLRVRAQDPAPRLYFVKVDVTGAYDALPQDRLAEVVANVLRPHENTYCLRRYAVVRRTAQGHVRRSFKRHVSTFTDLPPYMRQFVERLQETTSLRDSVVIEQSYSLNEASSGLFQLFLSLVYSHVIRIGGNLLLRLVDDFLLITPHLKRAQAFLRTLVRGVPEYGCSANLQKTAVNFPVEDMALGSTAPLQLPAHCLFPWCGLLLDTQTLEVSGGSKRTADGSEFEPKKKRKV

SEQ ID NO: 959 - protein, 1738 aa, synthetic construct
  REGION 1..1738: note = Description of Artificial Sequence: Synthetic polypeptide
MKRTADGSEFESPKKKRKVDKKYSIGLDIGTNSVGWAVITDEYKVPSKKFKVLGNTDRHSIKKNLIGALLFDSGETAEATRLKRTARRRYTRRKNRICYLQEIFSNEMAKVDDSFFHRLEESFLVEEDKKHERHPIFGNIVDEVAYHEKYPTIYHLRKKLVDSTDKADLRLIYLALAHMIKFRGHFLIEGDLNPDNSDVDKLFIQLVQTYNQLFEENPINASGVDAKAILSARLSKSRRLENLIAQLPGEKKNGLFGNLIALSLGLTPNFKSNFDLAEDAKLQLSKDTYDDDLDNLLAQIGDQYADLFLAAKNLSDAILLSDILRVNTEITKAPLSASMIKRYDEHHQDLTLLKALVRQQLPEKYKEIFFDQSKNGYAGYIDGGASQEEFYKFIKPILEKMDGTEELLVKLNREDLLRKQRTFDNGSIPHQIHLGELHAILRRQEDFYPFLKDNREKIEKILTFRIPYYVGPLARGNSRFAWMTRKSEETITPWNFEEVVDKGASAQSFIERMTNFDKNLPNEKVLPKHSLLYEYFTVYNELTKVKYVTEGMRKPAFLSGEQKKAIVDLLFKTNRKVTVKQLKEDYFKKIECFDSVEISGVEDRFNASLGTYHDLLKIIKDKDFLDNEENEDILEDIVLTLTLFEDREMIEERLKTYAHLFDDKVMKQLKRRRYTGWGRLSRKLINGIRDKQSGKTILDFLKSDGFANRNFMQLIHDDSLTFKEDIQKAQVSGQGDSLHEHIANLAGSPAIKKGILQTVKVVDELVKVMGRHKPENIVIEMARENQTTQKGQKNSRERMKRIEEGIKELGSQILKEHPVENTQLQNEKLYLYYLQNGRDMYVDQELDINRLSDYDVDAIVPQSFLKDDSIDNKVLTRSDKNRGKSDNVPSEEVVKKMKNYWRQLLNAKLITQRKFDNLTKAERGGLSELDKAGFIKRQLVETRQITKHVAQILDSRMNTKYDENDKLIREVKVITLKSKLVSDFRKDFQFYKVREINNYHHAHDAYLNAVVGTALIKKYPKLESEFVYGDYKVYDVRKMIAKSEQEIGKATAKYFFYSNIMNFFKTEITLANGEIRKRPLIETNGETGEIVWDKGRDFATVRKVLSMPQVNIVKKTEVQTGGFSKESILPKRNSDKLIARKKDWDPKKYGGFDSPTVAYSVLVVAKVEKGKSKKLKSVKELLGITIMERSSFEKNPIDFLEAKGYKEVKKDLIIKLPKYSLFELENGRKRMLASAGELQKGNELALPSKYVNFLYLASHYEKLKGSPEDNEQKQLFVEQHKHYLDEIIEQISEFSKRVILADANLDKVLSAYNKHRDKPIREQAENIIHLFTLTNLGAPAAFKYFDTTIDRKRYTSTKEVLDATLIHQSITGLYETRIDLSQLGGDSGGSSGGSSGSETPGTSESATPESSGGSSGGSSITPLVSFTSFAQFEQALRDSRVSAHSGASFSNSLEVDRLVKSARELYGRGLPPIVSSRTFSLLFGVSPRLISAMTKSPEKYWRTFEIKKRSGKGRNIAAPRVFLKTVQRFLLRFVLEKIPIHPNAFGFAPGKGIFKHAERHLKARFVLTLDIADFFPSISWTQVRDIFANIGFPDGVPSLLADLCTRNKVFPQGAPTSPYLSNLIFLKTDEALTEAANQFEMRYSRYADDLTFSCDSQPSDEARLAFEQIIRDAGFRIQHSKTRLRGPSQAREVTGLLVNEKIQPSRHTRRLLRAKFHSGGSKRTADGSEFEPKKKRKV

SEQ ID NO: 960 - protein, 1761 aa, synthetic construct
  REGION 1..1761: note = Description of Artificial Sequence: Synthetic polypeptide
MKRTADGSEFESPKKKRKVDKKYSIGLDIGTNSVGWAVITDEYKVPSKKFKVLGNTDRHSIKKNLIGALLFDSGETAEATRLKRTARRRYTRRKNRICYLQEIFSNEMAKVDDSFFHRLEESFLVEEDKKHERHPIFGNIVDEVAYHEKYPTIYHLRKKLVDSTDKADLRLIYLALAHMIKFRGHFLIEGDLNPDNSDVDKLFIQLVQTYNQLFEENPINASGVDAKAILSARLSKSRRLENLIAQLPGEKKNGLFGNLIALSLGLTPNFKSNFDLAEDAKLQLSKDTYDDDLDNLLAQIGDQYADLFLAAKNLSDAILLSDILRVNTEITKAPLSASMIKRYDEHHQDLTLLKALVRQQLPEKYKEIFFDQSKNGYAGYIDGGASQEEFYKFIKPILEKMDGTEELLVKLNREDLLRKQRTFDNGSIPHQIHLGELHAILRRQEDFYPFLKDNREKIEKILTFRIPYYVGPLARGNSRFAWMTRKSEETITPWNFEEVVDKGASAQSFIERMTNFDKNLPNEKVLPKHSLLYEYFTVYNELTKVKYVTEGMRKPAFLSGEQKKAIVDLLFKTNRKVTVKQLKEDYFKKIECFDSVEISGVEDRFNASLGTYHDLLKIIKDKDFLDNEENEDILEDIVLTLTLFEDREMIEERLKTYAHLFDDKVMKQLKRRRYTGWGRLSRKLINGIRDKQSGKTILDFLKSDGFANRNFMQLIHDDSLTFKEDIQKAQVSGQGDSLHEHIANLAGSPAIKKGILQTVKVVDELVKVMGRHKPENIVIEMARENQTTQKGQKNSRERMKRIEEGIKELGSQILKEHPVENTQLQNEKLYLYYLQNGRDMYVDQELDINRLSDYDVDAIVPQSFLKDDSIDNKVLTRSDKNRGKSDNVPSEEVVKKMKNYWRQLLNAKLITQRKFDNLTKAERGGLSELDKAGFIKRQLVETRQITKHVAQILDSRMNTKYDENDKLIREVKVITLKSKLVSDFRKDFQFYKVREINNYHHAHDAYLNAVVGTALIKKYPKLESEFVYGDYKVYDVRKMIAKSEQEIGKATAKYFFYSNIMNFFKTEITLANGEIRKRPLIETNGETGEIVWDKGRDFATVRKVLSMPQVNIVKKTEVQTGGFSKESILPKRNSDKLIARKKDWDPKKYGGFDSPTVAYSVLVVAKVEKGKSKKLKSVKELLGITIMERSSFEKNPIDFLEAKGYKEVKKDLIIKLPKYSLFELENGRKRMLASAGELQKGNELALPSKYVNFLYLASHYEKLKGSPEDNEQKQLFVEQHKHYLDEIIEQISEFSKRVILADANLDKVLSAYNKHRDKPIREQAENIIHLFTLTNLGAPAAFKYFDTTIDRKRYTSTKEVLDATLIHQSITGLYETRIDLSQLGGDSGGSSGGSSGSETPGTSESATPESSGGSSGGSSSSGSQLRVEIRGRRSQPIISSWVSLLESTLFTVSPSTTQLSPTHKSLSYPNYNFIDHIDADLSPHMTVRHILAADLGISVQLISRILANKTQYYRSFEIIRKNGNKRLIEAPRTYLKVLMRYINHHLLTGLAIHDSVHSYRQGKSFLTNAQIHVAKQYVFNLDIENYFGCINKRQVRELFSINDFTASAATLLSELCTFNDRLPQGAPTSPIISNAILFKIDQSMHRYCEKNNLCYTRYSDDITLSGNSRQSIVKAKSRLIAMIHGAGFKINDKKTRLMPYHKQQLVTGVVVNKEATPARNELRRIRAKFHSGGSKRTADGSGGSKRTADGSEFEPKKKRKV

SEQ ID NO: 961 - protein, 1902 aa, synthetic construct
  REGION 1..1902: note = Description of Artificial Sequence: Synthetic polypeptide
MKRTADGSEFESPKKKRKVDKKYSIGLDIGTNSVGWAVITDEYKVPSKKFKVLGNTDRHSIKKNLIGALLFDSGETAEATRLKRTARRRYTRRKNRICYLQEIFSNEMAKVDDSFFHRLEESFLVEEDKKHERHPIFGNIVDEVAYHEKYPTIYHLRKKLVDSTDKADLRLIYLALAHMIKFRGHFLIEGDLNPDNSDVDKLFIQLVQTYNQLFEENPINASGVDAKAILSARLSKSRRLENLIAQLPGEKKNGLFGNLIALSLGLTPNFKSNFDLAEDAKLQLSKDTYDDDLDNLLAQIGDQYADLFLAAKNLSDAILLSDILRVNTEITKAPLSASMIKRYDEHHQDLTLLKALVRQQLPEKYKEIFFDQSKNGYAGYIDGGASQEEFYKFIKPILEKMDGTEELLVKLNREDLLRKQRTFDNGSIPHQIHLGELHAILRRQEDFYPFLKDNREKIEKILTFRIPYYVGPLARGNSRFAWMTRKSEETITPWNFEEVVDKGASAQSFIERMTNFDKNLPNEKVLPKHSLLYEYFTVYNELTKVKYVTEGMRKPAFLSGEQKKAIVDLLFKTNRKVTVKQLKEDYFKKIECFDSVEISGVEDRFNASLGTYHDLLKIIKDKDFLDNEENEDILEDIVLTLTLFEDREMIEERLKTYAHLFDDKVMKQLKRRRYTGWGRLSRKLINGIRDKQSGKTILDFLKSDGFANRNFMQLIHDDSLTFKEDIQKAQVSGQGDSLHEHIANLAGSPAIKKGILQTVKVVDELVKVMGRHKPENIVIEMARENQTTQKGQKNSRERMKRIEEGIKELGSQILKEHPVENTQLQNEKLYLYYLQNGRDMYVDQELDINRLSDYDVDAIVPQSFLKDDSIDNKVLTRSDKNRGKSDNVPSEEVVKKMKNYWRQLLNAKLITQRKFDNLTKAERGGLSELDKAGFIKRQLVETRQITKHVAQILDSRMNTKYDENDKLIREVKVITLKSKLVSDFRKDFQFYKVREINNYHHAHDAYLNAVVGTALIKKYPKLESEFVYGDYKVYDVRKMIAKSEQEIGKATAKYFFYSNIMNFFKTEITLANGEIRKRPLIETNGETGEIVWDKGRDFATVRKVLSMPQVNIVKKTEVQTGGFSKESILPKRNSDKLIARKKDWDPKKYGGFDSPTVAYSVLVVAKVEKGKSKKLKSVKELLGITIMERSSFEKNPIDFLEAKGYKEVKKDLIIKLPKYSLFELENGRKRMLASAGELQKGNELALPSKYVNFLYLASHYEKLKGSPEDNEQKQLFVEQHKHYLDEIIEQISEFSKRVILADANLDKVLSAYNKHRDKPIREQAENIIHLFTLTNLGAPAAFKYFDTTIDRKRYTSTKEVLDATLIHQSITGLYETRIDLSQLGGDSGGSSGGSSGSETPGTSESATPESSGGSSGGSSRSHEGQRQQKISRESLRQREAVKPSGYAGAPSSSSAQIDPSSREANNDLLERMLRGDNLRLAYKRVVQNGGAPGVDNVTVANLQAYLKTHWEAVKTELLAGTYRPMPVKRVEIPKPGGGVRLLGIPTVMDRFLQQALLQVMTPIFDADFSRHSYGFRPGKRAHDAVKQAQRYMQEGFRWVVDMDLAKFFDRVNHDMLMARVARKVTDKCVLKLIRAYLNAGVMANGVTEKTGEGTPQGGPLSPLLANILLDDLDKELTERGLRFVRYADDCNIFVASKRAGERVMDSVTRFVEGKLKLKVNREKSAVDRPWNRKFLGFSFLRDKKATIRLAPQTISRFKEKVRELTNRTRSMSMENRIAQLNRYLMGWIGYFRLASAKGHCEKFDQWIRRRLRMCLWKQWKRVRTRIRELRALGVPEWACFVMANSRRGAWEMSRNTNNALPTSYWEAKGLKSLLSRYLELCSGGSKRTADGSEFEPKKKRKV

SEQ ID NO: 962 - protein, 1908 aa, synthetic construct
  REGION 1..1908: note = Description of Artificial Sequence: Synthetic polypeptide
MKRTADGSEFESPKKKRKVDKKYSIGLDIGTNSVGWAVITDEYKVPSKKFKVLGNTDRHSIKKNLIGALLFDSGETAEATRLKRTARRRYTRRKNRICYLQEIFSNEMAKVDDSFFHRLEESFLVEEDKKHERHPIFGNIVDEVAYHEKYPTIYHLRKKLVDSTDKADLRLIYLALAHMIKFRGHFLIEGDLNPDNSDVDKLFIQLVQTYNQLFEENPINASGVDAKAILSARLSKSRRLENLIAQLPGEKKNGLFGNLIALSLGLTPNFKSNFDLAEDAKLQLSKDTYDDDLDNLLAQIGDQYADLFLAAKNLSDAILLSDILRVNTEITKAPLSASMIKRYDEHHQDLTLLKALVRQQLPEKYKEIFFDQSKNGYAGYIDGGASQEEFYKFIKPILEKMDGTEELLVKLNREDLLRKQRTFDNGSIPHQIHLGELHAILRRQEDFYPFLKDNREKIEKILTFRIPYYVGPLARGNSRFAWMTRKSEETITPWNFEEVVDKGASAQSFIERMTNFDKNLPNEKVLPKHSLLYEYFTVYNELTKVKYVTEGMRKPAFLSGEQKKAIVDLLFKTNRKVTVKQLKEDYFKKIECFDSVEISGVEDRFNASLGTYHDLLKIIKDKDFLDNEENEDILEDIVLTLTLFEDREMIEERLKTYAHLFDDKVMKQLKRRRYTGWGRLSRKLINGIRDKQSGKTILDFLKSDGFANRNFMQLIHDDSLTFKEDIQKAQVSGQGDSLHEHIANLAGSPAIKKGILQTVKVVDELVKVMGRHKPENIVIEMARENQTTQKGQKNSRERMKRIEEGIKELGSQILKEHPVENTQLQNEKLYLYYLQNGRDMYVDQELDINRLSDYDVDAIVPQSFLKDDSIDNKVLTRSDKNRGKSDNVPSEEVVKKMKNYWRQLLNAKLITQRKFDNLTKAERGGLSELDKAGFIKRQLVETRQITKHVAQILDSRMNTKYDENDKLIREVKVITLKSKLVSDFRKDFQFYKVREINNYHHAHDAYLNAVVGTALIKKYPKLESEFVYGDYKVYDVRKMIAKSEQEIGKATAKYFFYSNIMNFFKTEITLANGEIRKRPLIETNGETGEIVWDKGRDFATVRKVLSMPQVNIVKKTEVQTGGFSKESILPKRNSDKLIARKKDWDPKKYGGFDSPTVAYSVLVVAKVEKGKSKKLKSVKELLGITIMERSSFEKNPIDFLEAKGYKEVKKDLIIKLPKYSLFELENGRKRMLASAGELQKGNELALPSKYVNFLYLASHYEKLKGSPEDNEQKQLFVEQHKHYLDEIIEQISEFSKRVILADANLDKVLSAYNKHRDKPIREQAENIIHLFTLTNLGAPAAFKYFDTTIDRKRYTSTKEVLDATLIHQSITGLYETRIDLSQLGGDSGGSSGGSSGSETPGTSESATPESSGGSSGGSSTSSRKEQGQQKTLSRGSLQEEVVNTQGTVRAQSSYPAQVRSDTCGTEYTLLDEMLKLDNMMAALKRVEQNKGAAGVDEVDVKSLRPYLKEHWFRIREELLEGTYKPQPVRRVEIPKSDGGVRLLGIPTLVDRLIQQGLAQVLTPIFDPNFSNSSYGFRPNRSTHQAVKQAKQYIEDGYRHVVDLDLEKFFDRVNHDILMARVTRKVKDKRVLKLIRAYLNAGVMANGVCVRSEQGVPQGGPLSPILSNIILDDLDKELERRGHRFVRYADDCNIYVKTVRAGQRVMEGVKRFVEDELKLKVNEQKSAVDRPWKRKFLGFSFTPERKTRTRIAPKARAKFEDKVRELTSRSRSMSMAKRIDQLNVYLRGWMGYFRLADTRSVIESLDQWTRRRLRMCYLKQWKKPKSVYRNLVKLGLSADFARRISGSGKGYWRLSNTPQMNKALGLAFWANQGLLSLVHLYDKHRSVSSGGSKRTADGSEFEPKKKRKV

SEQ ID NO: 963 - protein, 1857 aa, synthetic construct
  REGION 1..1857: note = Description of Artificial Sequence: Synthetic polypeptide
MKRTADGSEFESPKKKRKVDKKYSIGLDIGTNSVGWAVITDEYKVPSKKFKVLGNTDRHSIKKNLIGALLFDSGETAEATRLKRTARRRYTRRKNRICYLQEIFSNEMAKVDDSFFHRLEESFLVEEDKKHERHPIFGNIVDEVAYHEKYPTIYHLRKKLVDSTDKADLRLIYLALAHMIKFRGHFLIEGDLNPDNSDVDKLFIQLVQTYNQLFEENPINASGVDAKAILSARLSKSRRLENLIAQLPGEKKNGLFGNLIALSLGLTPNFKSNFDLAEDAKLQLSKDTYDDDLDNLLAQIGDQYADLFLAAKNLSDAILLSDILRVNTEITKAPLSASMIKRYDEHHQDLTLLKALVRQQLPEKYKEIFFDQSKNGYAGYIDGGASQEEFYKFIKPILEKMDGTEELLVKLNREDLLRKQRTFDNGSIPHQIHLGELHAILRRQEDFYPFLKDNREKIEKILTFRIPYYVGPLARGNSRFAWMTRKSEETITPWNFEEVVDKGASAQSFIERMTNFDKNLPNEKVLPKHSLLYEYFTVYNELTKVKYVTEGMRKPAFLSGEQKKAIVDLLFKTNRKVTVKQLKEDYFKKIECFDSVEISGVEDRFNASLGTYHDLLKIIKDKDFLDNEENEDILEDIVLTLTLFEDREMIEERLKTYAHLFDDKVMKQLKRRRYTGWGRLSRKLINGIRDKQSGKTILDFLKSDGFANRNFMQLIHDDSLTFKEDIQKAQVSGQGDSLHEHIANLAGSPAIKKGILQTVKVVDELVKVMGRHKPENIVIEMARENQTTQKGQKNSRERMKRIEEGIKELGSQILKEHPVENTQLQNEKLYLYYLQNGRDMYVDQELDINRLSDYDVDAIVPQSFLKDDSIDNKVLTRSDKNRGKSDNVPSEEVVKKMKNYWRQLLNAKLITQRKFDNLTKAERGGLSELDKAGFIKRQLVETRQITKHVAQILDSRMNTKYDENDKLIREVKVITLKSKLVSDFRKDFQFYKVREINNYHHAHDAYLNAVVGTALIKKYPKLESEFVYGDYKVYDVRKMIAKSEQEIGKATAKYFFYSNIMNFFKTEITLANGEIRKRPLIETNGETGEIVWDKGRDFATVRKVLSMPQVNIVKKTEVQTGGFSKESILPKRNSDKLIARKKDWDPKKYGGFDSPTVAYSVLVVAKVEKGKSKKLKSVKELLGITIMERSSFEKNPIDFLEAKGYKEVKKDLIIKLPKYSLFELENGRKRMLASAGELQKGNELALPSKYVNFLYLASHYEKLKGSPEDNEQKQLFVEQHKHYLDEIIEQISEFSKRVILADANLDKVLSAYNKHRDKPIREQAENIIHLFTLTNLGAPAAFKYFDTTIDRKRYTSTKEVLDATLIHQSITGLYETRIDLSQLGGDSGGSSGGSSGSETPGTSESATPESSGGSSGGSSWEQVWERENLLAALKRVERNGGAPGIDGMTVEELRPYLREHWLEIRETLDQQSYQPSPVRRVEIDKPEGGVRLLGIPTVLDRFLQQAMAQVLTPLFEPQFSPASYGFRPGRSAHEAVKQAQEYVQAGYEWVVDIDLERYFDQVNHDMLMARVARVVADKRVLKEIRAYLKSGVMVNGVVQDTGEGTPQGGPLSPLLSNIMLDDLDKELEKRGHKFVRYADDCNVYVRTQRAGERVMESVKAYLEKKLKLKVNPKKSKVERATRVKFLGFSFYERNGEVRVRVASQSVARFRKKLRGLTKRTRSGKLEEVIETINGYLMGWMAYYRLADTPSVFAGLDSWIRRRLRQMIWKRWKRGKTRYRELVKLGVPRGRAALGAVGKSPWHMSKTPVVNEALSNAYLRNSGLKSLKARYQELRVASGGSKRTADGSEFEPKKKRKV

SEQ ID NO: 964 - protein, 1858 aa, synthetic construct
  REGION 1..1858: note = Description of Artificial Sequence: Synthetic polypeptide
MKRTADGSEFESPKKKRKVDKKYSIGLDIGTNSVGWAVITDEYKVPSKKFKVLGNTDRHSIKKNLIGALLFDSGETAEATRLKRTARRRYTRRKNRICYLQEIFSNEMAKVDDSFFHRLEESFLVEEDKKHERHPIFGNIVDEVAYHEKYPTIYHLRKKLVDSTDKADLRLIYLALAHMIKFRGHFLIEGDLNPDNSDVDKLFIQLVQTYNQLFEENPINASGVDAKAILSARLSKSRRLENLIAQLPGEKKNGLFGNLIALSLGLTPNFKSNFDLAEDAKLQLSKDTYDDDLDNLLAQIGDQYADLFLAAKNLSDAILLSDILRVNTEITKAPLSASMIKRYDEHHQDLTLLKALVRQQLPEKYKEIFFDQSKNGYAGYIDGGASQEEFYKFIKPILEKMDGTEELLVKLNREDLLRKQRTFDNGSIPHQIHLGELHAILRRQEDFYPFLKDNREKIEKILTFRIPYYVGPLARGNSRFAWMTRKSEETITPWNFEEVVDKGASAQSFIERMTNFDKNLPNEKVLPKHSLLYEYFTVYNELTKVKYVTEGMRKPAFLSGEQKKAIVDLLFKTNRKVTVKQLKEDYFKKIECFDSVEISGVEDRFNASLGTYHDLLKIIKDKDFLDNEENEDILEDIVLTLTLFEDREMIEERLKTYAHLFDDKVMKQLKRRRYTGWGRLSRKLINGIRDKQSGKTILDFLKSDGFANRNFMQLIHDDSLTFKEDIQKAQVSGQGDSLHEHIANLAGSPAIKKGILQTVKVVDELVKVMGRHKPENIVIEMARENQTTQKGQKNSRERMKRIEEGIKELGSQILKEHPVENTQLQNEKLYLYYLQNGRDMYVDQELDINRLSDYDVDAIVPQSFLKDDSIDNKVLTRSDKNRGKSDNVPSEEVVKKMKNYWRQLLNAKLITQRKFDNLTKAERGGLSELDKAGFIKRQLVETRQITKHVAQILDSRMNTKYDENDKLIREVKVITLKSKLVSDFRKDFQFYKVREINNYHHAHDAYLNAVVGTALIKKYPKLESEFVYGDYKVYDVRKMIAKSEQEIGKATAKYFFYSNIMNFFKTEITLANGEIRKRPLIETNGETGEIVWDKGRDFATVRKVLSMPQVNIVKKTEVQTGGFSKESILPKRNSDKLIARKKDWDPKKYGGFDSPTVAYSVLVVAKVEKGKSKKLKSVKELLGITIMERSSFEKNPIDFLEAKGYKEVKKDLIIKLPKYSLFELENGRKRMLASAGELQKGNELALPSKYVNFLYLASHYEKLKGSPEDNEQKQLFVEQHKHYLDEIIEQISEFSKRVILADANLDKVLSAYNKHRDKPIREQAENIIHLFTLTNLGAPAAFKYFDTTIDRKRYTSTKEVLDATLIHQSITGLYETRIDLSQLGGDSGGSSGGSSGSETPGTSESATPESSGGSSGGSSLNQILARPNMIQALKRVEANKGRHGVDMMPVQTLRQHILENWESIKAQILTGTYEPQPVRRVEIPKPDGGVRLLGIPTVTDRLIQQAISQILSKEYDQTFSDNSYGFRPNRSAHDAVRKAKGYMKEGYRWVVDMDLEKFFDKVNHDRLMATLAKRIHDKSLLKLIRKYLQAGVMINGVVSSTEEGTPQGGPLSPLLSNIVLDELDKELEKRGHKFVRYADDCNIYVKSKRAGDRTIASVQRFVEGKLRLKMNESKSAVDRPWNRKFLGFSFSHHKEPKVRVAKTSLQRMKKKIREITSRKKPVPMEHRIEKLNQYLIGWCGYFALADTPSIFSRLDGWIKRRLRMCLWKNWKKPRTRVRNLIRLKVPYGKAYEWGNTRKGYWRISKSPILHRTLGNSYWGSQGLKSLQSRYESLRYSSSGGSKRTADGSEFEPKKKRKV

SEQ ID NO: 965 - protein, 1858 aa, synthetic construct
  REGION 1..1858: note = Description of Artificial Sequence: Synthetic polypeptide
MKRTADGSEFESPKKKRKVDKKYSIGLDIGTNSVGWAVITDEYKVPSKKFKVLGNTDRHSIKKNLIGALLFDSGETAEATRLKRTARRRYTRRKNRICYLQEIFSNEMAKVDDSFFHRLEESFLVEEDKKHERHPIFGNIVDEVAYHEKYPTIYHLRKKLVDSTDKADLRLIYLALAHMIKFRGHFLIEGDLNPDNSDVDKLFIQLVQTYNQLFEENPINASGVDAKAILSARLSKSRRLENLIAQLPGEKKNGLFGNLIALSLGLTPNFKSNFDLAEDAKLQLSKDTYDDDLDNLLAQIGDQYADLFLAAKNLSDAILLSDILRVNTEITKAPLSASMIKRYDEHHQDLTLLKALVRQQLPEKYKEIFFDQSKNGYAGYIDGGASQEEFYKFIKPILEKMDGTEELLVKLNREDLLRKQRTFDNGSIPHQIHLGELHAILRRQEDFYPFLKDNREKIEKILTFRIPYYVGPLARGNSRFAWMTRKSEETITPWNFEEVVDKGASAQSFIERMTNFDKNLPNEKVLPKHSLLYEYFTVYNELTKVKYVTEGMRKPAFLSGEQKKAIVDLLFKTNRKVTVKQLKEDYFKKIECFDSVEISGVEDRFNASLGTYHDLLKIIKDKDFLDNEENEDILEDIVLTLTLFEDREMIEERLKTYAHLFDDKVMKQLKRRRYTGWGRLSRKLINGIRDKQSGKTILDFLKSDGFANRNFMQLIHDDSLTFKEDIQKAQVSGQGDSLHEHIANLAGSPAIKKGILQTVKVVDELVKVMGRHKPENIVIEMARENQTTQKGQKNSRERMKRIEEGIKELGSQILKEHPVENTQLQNEKLYLYYLQNGRDMYVDQELDINRLSDYDVDAIVPQSFLKDDSIDNKVLTRSDKNRGKSDNVPSEEVVKKMKNYWRQLLNAKLITQRKFDNLTKAERGGLSELDKAGFIKRQLVETRQITKHVAQILDSRMNTKYDENDKLIREVKVITLKSKLVSDFRKDFQFYKVREINNYHHAHDAYLNAVVGTALIKKYPKLESEFVYGDYKVYDVRKMIAKSEQEIGKATAKYFFYSNIMNFFKTEITLANGEIRKRPLIETNGETGEIVWDKGRDFATVRKVLSMPQVNIVKKTEVQTGGFSKESILPKRNSDKLIARKKDWDPKKYGGFDSPTVAYSVLVVAKVEKGKSKKLKSVKELLGITIMERSSFEKNPIDFLEAKGYKEVKKDLIIKLPKYSLFELENGRKRMLASAGELQKGNELALPSKYVNFLYLASHYEKLKGSPEDNEQKQLFVEQHKHYLDEIIEQISEFSKRVILADANLDKVLSAYNKHRDKPIREQAENIIHLFTLTNLGAPAAFKYFDTTIDRKRYTSTKEVLDATLIHQSITGLYETRIDLSQLGGDSGGSSGGSSGSETPGTSESATPESSGGSSGGSSLMDLILSRENLIAALKRVERNKGSHGIDGMSVKSLRRHLYENWDSLCDSLRKGTYQPNPVRRIEIPKPNGGVRLLGIPTVTDRFIQQAIAQILTPLFDPSFSEHSYGFRPNRRGHDAVRKAREYISEGYRWVIDMDLEKFFDKVNHDKLMGILASRIQDRLVLKLIRKYLQAGIMINGVVYDAEEGTPQGGPLSPLLSNILLDKLDKELERRGHKFVRYADDCNIYMKSKKAGERVMNSITRFIEQKLKLKVNRGKSAVDRPWKRKFLGFSFTLNKKPKVRIANESIKRLKTKIREFTSRSKSIPMEVRIEKLNQYLTGWCGYFALADTPSKFKEFDEWIRRRLRMIEWKQWKNPRTRVRKLKGLGVPDQKAYEWGNSRRKYWRIASSPILHKTLDNSYWSNRGLKSLYQRYEFLRQTSGGSKRTADGSEFEPKKKRKV

SEQ ID NO: 966 - protein, 1907 aa, synthetic construct
  REGION 1..1907: note = Description of Artificial Sequence: Synthetic polypeptide
MKRTADGSEFESPKKKRKVDKKYSIGLDIGTNSVGWAVITDEYKVPSKKFKVLGNTDRHSIKKNLIGALLFDSGETAEATRLKRTARRRYTRRKNRICYLQEIFSNEMAKVDDSFFHRLEESFLVEEDKKHERHPIFGNIVDEVAYHEKYPTIYHLRKKLVDSTDKADLRLIYLALAHMIKFRGHFLIEGDLNPDNSDVDKLFIQLVQTYNQLFEENPINASGVDAKAILSARLSKSRRLENLIAQLPGEKKNGLFGNLIALSLGLTPNFKSNFDLAEDAKLQLSKDTYDDDLDNLLAQIGDQYADLFLAAKNLSDAILLSDILRVNTEITKAPLSASMIKRYDEHHQDLTLLKALVRQQLPEKYKEIFFDQSKNGYAGYIDGGASQEEFYKFIKPILEKMDGTEELLVKLNREDLLRKQRTFDNGSIPHQIHLGELHAILRRQEDFYPFLKDNREKIEKILTFRIPYYVGPLARGNSRFAWMTRKSEETITPWNFEEVVDKGASAQSFIERMTNFDKNLPNEKVLPKHSLLYEYFTVYNELTKVKYVTEGMRKPAFLSGEQKKAIVDLLFKTNRKVTVKQLKEDYFKKIECFDSVEISGVEDRFNASLGTYHDLLKIIKDKDFLDNEENEDILEDIVLTLTLFEDREMIEERLKTYAHLFDDKVMKQLKRRRYTGWGRLSRKLINGIRDKQSGKTILDFLKSDGFANRNFMQLIHDDSLTFKEDIQKAQVSGQGDSLHEHIANLAGSPAIKKGILQTVKVVDELVKVMGRHKPENIVIEMARENQTTQKGQKNSRERMKRIEEGIKELGSQILKEHPVENTQLQNEKLYLYYLQNGRDMYVDQELDINRLSDYDVDAIVPQSFLKDDSIDNKVLTRSDKNRGKSDNVPSEEVVKKMKNYWRQLLNAKLITQRKFDNLTKAERGGLSELDKAGFIKRQLVETRQITKHVAQILDSRMNTKYDENDKLIREVKVITLKSKLVSDFRKDFQFYKVREINNYHHAHDAYLNAVVGTALIKKYPKLESEFVYGDYKVYDVRKMIAKSEQEIGKATAKYFFYSNIMNFFKTEITLANGEIRKRPLIETNGETGEIVWDKGRDFATVRKVLSMPQVNIVKKTEVQTGGFSKESILPKRNSDKLIARKKDWDPKKYGGFDSPTVAYSVLVVAKVEKGKSKKLKSVKELLGITIMERSSFEKNPIDFLEAKGYKEVKKDLIIKLPKYSLFELENGRKRMLASAGELQKGNELALPSKYVNFLYLASHYEKLKGSPEDNEQKQLFVEQHKHYLDEIIEQISEFSKRVILADANLDKVLSAYNKHRDKPIREQAENIIHLFTLTNLGAPAAFKYFDTTIDRKRYTSTKEVLDATLIHQSITGLYETRIDLSQLGGDSGGSSGGSSGSETPGTSESATPESSGGSSGGSSSSNELHRKQKTHSRASLREIAVNTQRTAKGQSISSAQTRISPCKDQGNNLMEKVVERSNMMAALRRVEQNKGAAGIDGVKTDELRNLLWDIWTDTKEQLLTGTYRPKPVRRVEIPKPNGGVRLLGIPTVLDRLIQQALLQILTSIFDPTFSEASYGFRPGKRAHTAVRVARSYVESGYDWVIDMDIEKFFDRVNHDILMARVARKVKDKRVLKLIRRYLQAGVMLGGVVVRTEEGTPQGGPLSPLLANIYLDDLDKELEKRGHKFVRYADDCNIYVKSQRAAERVMQSIREFLQKRLKLKVNEEKSCVDRPWNLKYLGFSMFKSKGKVRICLAPETIKRVKNKIREFTSRSKPIRMEDRIRRLNAYLGGWLGYFALADTSNDFASIDGWLRRRLRMCLWRQWDRVRTRLRELRALGLPEWVAHQLANTRKGPWRMSHRPLHSALNNAYWEKQGLLSLAKRHQAICQASGGSKRTADGSEFEPKKKRKV

SEQ ID NO: 967 - protein, 1858 aa, synthetic construct
  REGION 1..1858: note = Description of Artificial Sequence: Synthetic polypeptide
MKRTADGSEFESPKKKRKVDKKYSIGLDIGTNSVGWAVITDEYKVPSKKFKVLGNTDRHSIKKNLIGALLFDSGETAEATRLKRTARRRYTRRKNRICYLQEIFSNEMAKVDDSFFHRLEESFLVEEDKKHERHPIFGNIVDEVAYHEKYPTIYHLRKKLVDSTDKADLRLIYLALAHMIKFRGHFLIEGDLNPDNSDVDKLFIQLVQTYNQLFEENPINASGVDAKAILSARLSKSRRLENLIAQLPGEKKNGLFGNLIALSLGLTPNFKSNFDLAEDAKLQLSKDTYDDDLDNLLAQIGDQYADLFLAAKNLSDAILLSDILRVNTEITKAPLSASMIKRYDEHHQDLTLLKALVRQQLPEKYKEIFFDQSKNGYAGYIDGGASQEEFYKFIKPILEKMDGTEELLVKLNREDLLRKQRTFDNGSIPHQIHLGELHAILRRQEDFYPFLKDNREKIEKILTFRIPYYVGPLARGNSRFAWMTRKSEETITPWNFEEVVDKGASAQSFIERMTNFDKNLPNEKVLPKHSLLYEYFTVYNELTKVKYVTEGMRKPAFLSGEQKKAIVDLLFKTNRKVTVKQLKEDYFKKIECFDSVEISGVEDRFNASLGTYHDLLKIIKDKDFLDNEENEDILEDIVLTLTLFEDREMIEERLKTYAHLFDDKVMKQLKRRRYTGWGRLSRKLINGIRDKQSGKTILDFLKSDGFANRNFMQLIHDDSLTFKEDIQKAQVSGQGDSLHEHIANLAGSPAIKKGILQTVKVVDELVKVMGRHKPENIVIEMARENQTTQKGQKNSRERMKRIEEGIKELGSQILKEHPVENTQLQNEKLYLYYLQNGRDMYVDQELDINRLSDYDVDAIVPQSFLKDDSIDNKVLTRSDKNRGKSDNVPSEEVVKKMKNYWRQLLNAKLITQRKFDNLTKAERGGLSELDKAGFIKRQLVETRQITKHVAQILDSRMNTKYDENDKLIREVKVITLKSKLVSDFRKDFQFYKVREINNYHHAHDAYLNAVVGTALIKKYPKLESEFVYGDYKVYDVRKMIAKSEQEIGKATAKYFFYSNIMNFFKTEITLANGEIRKRPLIETNGETGEIVWDKGRDFATVRKVLSMPQVNIVKKTEVQTGGFSKESILPKRNSDKLIARKKDWDPKKYGGFDSPTVAYSVLVVAKVEKGKSKKLKSVKELLGITIMERSSFEKNPIDFLEAKGYKEVKKDLIIKLPKYSLFELENGRKRMLASAGELQKGNELALPSKYVNFLYLASHYEKLKGSPEDNEQKQLFVEQHKHYLDEIIEQISEFSKRVILADANLDKVLSAYNKHRDKPIREQAENIIHLFTLTNLGAPAAFKYFDTTIDRKRYTSTKEVLDATLIHQSITGLYETRIDLSQLGGDSGGSSGGSSGSETPGTSESATPESSGGSSGGSSLERILSRENLIQALTRVEGNKGSHGVDEMPVQNLRAHILEHWTTIRGQLEKGTYYPQPVRRVEIPKPNGGKRKLGIPTVMDRFLQQAIAQVLTDIYDPTFSQHSYGFRPKRRGHDAVREARNYIKQGYRWVVDMDLEKFFDKVNHDRLMRTLSQRINDSRVLKLIRRYLQAGVMEDGIVRPNTEGAPQGGPLSPLLSNIVLDELDKELEKRGLHFVRYADDCNIYVRSKRAGLRVMKSITKFIEGKLKLKVNEQKSAVDRPWKRKFLGFSFTVHKEKPKIRVSKESVQRFKQRIRELTSRRKSMNMKDRIEKLNRYLVGWLGYYQLADTPSIFKGLDSWIRRRLRMIRWKEWKKVKTKYKNLMKQGINKGKAWEWANTRKAYWRIANSPILHKALGDRYWSNQGLKSLYYRYQTLRWTSGGSKRTADGSEFEPKKKRKV

SEQ ID NO: 968 - protein, 1872 aa, synthetic construct
  REGION 1..1872: note = Description of Artificial Sequence: Synthetic polypeptide
MKRTADGSEFESPKKKRKVDKKYSIGLDIGTNSVGWAVITDEYKVPSKKFKVLGNTDRHSIKKNLIGALLFDSGETAEATRLKRTARRRYTRRKNRICYLQEIFSNEMAKVDDSFFHRLEESFLVEEDKKHERHPIFGNIVDEVAYHEKYPTIYHLRKKLVDSTDKADLRLIYLALAHMIKFRGHFLIEGDLNPDNSDVDKLFIQLVQTYNQLFEENPINASGVDAKAILSARLSKSRRLENLIAQLPGEKKNGLFGNLIALSLGLTPNFKSNFDLAEDAKLQLSKDTYDDDLDNLLAQIGDQYADLFLAAKNLSDAILLSDILRVNTEITKAPLSASMIKRYDEHHQDLTLLKALVRQQLPEKYKEIFFDQSKNGYAGYIDGGASQEEFYKFIKPILEKMDGTEELLVKLNREDLLRKQRTFDNGSIPHQIHLGELHAILRRQEDFYPFLKDNREKIEKILTFRIPYYVGPLARGNSRFAWMTRKSEETITPWNFEEVVDKGASAQSFIERMTNFDKNLPNEKVLPKHSLLYEYFTVYNELTKVKYVTEGMRKPAFLSGEQKKAIVDLLFKTNRKVTVKQLKEDYFKKIECFDSVEISGVEDRFNASLGTYHDLLKIIKDKDFLDNEENEDILEDIVLTLTLFEDREMIEERLKTYAHLFDDKVMKQLKRRRYTGWGRLSRKLINGIRDKQSGKTILDFLKSDGFANRNFMQLIHDDSLTFKEDIQKAQVSGQGDSLHEHIANLAGSPAIKKGILQTVKVVDELVKVMGRHKPENIVIEMARENQTTQKGQKNSRERMKRIEEGIKELGSQILKEHPVENTQLQNEKLYLYYLQNGRDMYVDQELDINRLSDYDVDAIVPQSFLKDDSIDNKVLTRSDKNRGKSDNVPSEEVVKKMKNYWRQLLNAKLITQRKFDNLTKAERGGLSELDKAGFIKRQLVETRQITKHVAQILDSRMNTKYDENDKLIREVKVITLKSKLVSDFRKDFQFYKVREINNYHHAHDAYLNAVVGTALIKKYPKLESEFVYGDYKVYDVRKMIAKSEQEIGKATAKYFFYSNIMNFFKTEITLANGEIRKRPLIETNGETGEIVWDKGRDFATVRKVLSMPQVNIVKKTEVQTGGFSKESILPKRNSDKLIARKKDWDPKKYGGFDSPTVAYSVLVVAKVEKGKSKKLKSVKELLGITIMERSSFEKNPIDFLEAKGYKEVKKDLIIKLPKYSLFELENGRKRMLASAGELQKGNELALPSKYVNFLYLASHYEKLKGSPEDNEQKQLFVEQHKHYLDEIIEQISEFSKRVILADANLDKVLSAYNKHRDKPIREQAENIIHLFTLTNLGAPAAFKYFDTTIDRKRYTSTKEVLDATLIHQSITGLYETRIDLSQLGGDSGGSSGGSSGSETPGTSESATPESSGGSSGGSSAQIEEFVHVERISMLMEMILSRENLLAALKRVEQNKGSHGVDGMSVKDLRRHLYENWDSIRQSLREGTYKPLPVRRVEIPKPNGGVRLLGIPTVTDRFIQQAIAQVLTKIFDPTFSNHSYGFRPGRRGHDAVREAKGYIKEGYRWVVDIDLEKFFDKVNHDKLMGILAKTIKDQILLKVIRRYLQSGVMINGVVMETDMGTPQGGPLSPLLSNIMLHELDKELEKRGHKFVRYADDCNIYVKTKKAGIRVMNSITNFIEKELKLKVNKEKSAVDRPWKRKFLGFSFTLNKTPKVRIANESVKRLKNKIREITSRSKPYPMEKRIEKLNKYLMGWCGYFALAETPSKFKELDEWIRRRLRMCLWKEWKTPKTRIRKLRGLGVPSHKAFEWGNTRKKYWRIACSPILHKTLDNSYWKRRGLRSLFERYQALRHTSGGSKRTADGSEFEPKKKRKV

SEQ ID NO: 969 - protein, 1857 aa, synthetic construct
  REGION 1..1857: note = Description of Artificial Sequence: Synthetic polypeptide
MKRTADGSEFESPKKKRKVDKKYSIGLDIGTNSVGWAVITDEYKVPSKKFKVLGNTDRHSIKKNLIGALLFDSGETAEATRLKRTARRRYTRRKNRICYLQEIFSNEMAKVDDSFFHRLEESFLVEEDKKHERHPIFGNIVDEVAYHEKYPTIYHLRKKLVDSTDKADLRLIYLALAHMIKFRGHFLIEGDLNPDNSDVDKLFIQLVQTYNQLFEENPINASGVDAKAILSARLSKSRRLENLIAQLPGEKKNGLFGNLIALSLGLTPNFKSNFDLAEDAKLQLSKDTYDDDLDNLLAQIGDQYADLFLAAKNLSDAILLSDILRVNTEITKAPLSASMIKRYDEHHQDLTLLKALVRQQLPEKYKEIFFDQSKNGYAGYIDGGASQEEFYKFIKPILEKMDGTEELLVKLNREDLLRKQRTFDNGSIPHQIHLGELHAILRRQEDFYPFLKDNREKIEKILTFRIPYYVGPLARGNSRFAWMTRKSEETITPWNFEEVVDKGASAQSFIERMTNFDKNLPNEKVLPKHSLLYEYFTVYNELTKVKYVTEGMRKPAFLSGEQKKAIVDLLFKTNRKVTVKQLKEDYFKKIECFDSVEISGVEDRFNASLGTYHDLLKIIKDKDFLDNEENEDILEDIVLTLTLFEDREMIEERLKTYAHLFDDKVMKQLKRRRYTGWGRLSRKLINGIRDKQSGKTILDFLKSDGFANRNFMQLIHDDSLTFKEDIQKAQVSGQGDSLHEHIANLAGSPAIKKGILQTVKVVDELVKVMGRHKPENIVIEMARENQTTQKGQKNSRERMKRIEEGIKELGSQILKEHPVENTQLQNEKLYLYYLQNGRDMYVDQELDINRLSDYDVDAIVPQSFLKDDSIDNKVLTRSDKNRGKSDNVPSEEVVKKMKNYWRQLLNAKLITQRKFDNLTKAERGGLSELDKAGFIKRQLVETRQITKHVAQILDSRMNTKYDENDKLIREVKVITLKSKLVSDFRKDFQFYKVREINNYHHAHDAYLNAVVGTALIKKYPKLESEFVYGDYKVYDVRKMIAKSEQEIGKATAKYFFYSNIMNFFKTEITLANGEIRKRPLIETNGETGEIVWDKGRDFATVRKVLSMPQVNIVKKTEVQTGGFSKESILPKRNSDKLIARKKDWDPKKYGGFDSPTVAYSVLVVAKVEKGKSKKLKSVKELLGITIMERSSFEKNPIDFLEAKGYKEVKKDLIIKLPKYSLFELENGRKRMLASAGELQKGNELALPSKYVNFLYLASHYEKLKGSPEDNEQKQLFVEQHKHYLDEIIEQISEFSKRVILADANLDKVLSAYNKHRDKPIREQAENIIHLFTLTNLGAPAAFKYFDTTIDRKRYTSTKEVLDATLIHQSITGLYETRIDLSQLGGDSGGSSGGSSGSETPGTSESATPESSGGSSGGSSMERILSRENLIQALERVEKNKGSYGVDEMDVKSLRLHLHENWTSIRNEIIEGSYFPKPVRRVEIPKPNGGVRKLGIPTVMDRFLQQAIAQILTQLYDPTFSERSFGFRPHRRGHNAVRQAKQWMKEGYRWVVDIDLEKFFDKVNHDRLMRKLSSRIQDPRVLQLIRRYLQTGVMERGLVSPNTEGTPQGGPLSPLLSNIVLDELDNELEKRGLKFVRYADDCNIYVRSKRAGLRIMESVTSFIENRLKLKVNREKSAVDRPWNRKFLGFSFTRGKDPKMRVSKESVKRLKQRIRELTSRRHSMKMSDRLRRLNRYLTGWLGYYQVVDTPSILAQIDAWIRRRLRMIRWKEWKTTSARQKNLVRLGIKKAKAWQWANSRKGYWRVAHSPIMDYALNSEYWKGQGLMSLAERYQTRRWTSGGSKRTADGSEFEPKKKRKV

SEQ ID NO: 970 - protein, 2131 aa, synthetic construct
  REGION 1..2131: note = Description of Artificial Sequence: Synthetic polypeptide
MKRTADGSEFESPKKKRKVDKKYSIGLDIGTNSVGWAVITDEYKVPSKKFKVLGNTDRHSIKKNLIGALLFDSGETAEATRLKRTARRRYTRRKNRICYLQEIFSNEMAKVDDSFFHRLEESFLVEEDKKHERHPIFGNIVDEVAYHEKYPTIYHLRKKLVDSTDKADLRLIYLALAHMIKFRGHFLIEGDLNPDNSDVDKLFIQLVQTYNQLFEENPINASGVDAKAILSARLSKSRRLENLIAQLPGEKKNGLFGNLIALSLGLTPNFKSNFDLAEDAKLQLSKDTYDDDLDNLLAQIGDQYADLFLAAKNLSDAILLSDILRVNTEITKAPLSASMIKRYDEHHQDLTLLKALVRQQLPEKYKEIFFDQSKNGYAGYIDGGASQEEFYKFIKPILEKMDGTEELLVKLNREDLLRKQRTFDNGSIPHQIHLGELHAILRRQEDFYPFLKDNREKIEKILTFRIPYYVGPLARGNSRFAWMTRKSEETITPWNFEEVVDKGASAQSFIERMTNFDKNLPNEKVLPKHSLLYEYFTVYNELTKVKYVTEGMRKPAFLSGEQKKAIVDLLFKTNRKVTVKQLKEDYFKKIECFDSVEISGVEDRFNASLGTYHDLLKIIKDKDFLDNEENEDILEDIVLTLTLFEDREMIEERLKTYAHLFDDKVMKQLKRRRYTGWGRLSRKLINGIRDKQSGKTILDFLKSDGFANRNFMQLIHDDSLTFKEDIQKAQVSGQGDSLHEHIANLAGSPAIKKGILQTVKVVDELVKVMGRHKPENIVIEMARENQTTQKGQKNSRERMKRIEEGIKELGSQILKEHPVENTQLQNEKLYLYYLQNGRDMYVDQELDINRLSDYDVDAIVPQSFLKDDSIDNKVLTRSDKNRGKSDNVPSEEVVKKMKNYWRQLLNAKLITQRKFDNLTKAERGGLSELDKAGFIKRQLVETRQITKHVAQILDSRMNTKYDENDKLIREVKVITLKSKLVSDFRKDFQFYKVREINNYHHAHDAYLNAVVGTALIKKYPKLESEFVYGDYKVYDVRKMIAKSEQEIGKATAKYFFYSNIMNFFKTEITLANGEIRKRPLIETNGETGEIVWDKGRDFATVRKVLSMPQVNIVKKTEVQTGGFSKESILPKRNSDKLIARKKDWDPKKYGGFDSPTVAYSVLVVAKVEKGKSKKLKSVKELLGITIMERSSFEKNPIDFLEAKGYKEVKKDLIIKLPKYSLFELENGRKRMLASAGELQKGNELALPSKYVNFLYLASHYEKLKGSPEDNEQKQLFVEQHKHYLDEIIEQISEFSKRVILADANLDKVLSAYNKHRDKPIREQAENIIHLFTLTNLGAPAAFKYFDTTIDRKRYTSTKEVLDATLIHQSITGLYETRIDLSQLGGDSGGSSGGSSGSETPGTSESATPESSGGSSGGSSSLQLEEEYRLYQEREKPPEELQEWLLRFPQAWAETGGTGMARQAPPVVIELKSGATPIGVRQYPMSKEAREGIRPHIKRLLEQGILVPCRSPWNTPLLPVKKPGTNDYRPVQDLREVNKRVQDVHPTVPNPYNLLSTLPPTRTWYTVLDLKDAFFCLRLHPNSQPLFAFEWRDPESGRTGQLTWTRLPQGFKNSPTLFDEALHRDLAPFRANNPQVTLIIYIDDILLATETREDCELGTQKILAELGELGYRVSAKKAQLCRTEVTYLGYTLKNGQRWLTEARKRTVTQIPTPTTPRQVREFLGTAGFCRLWIPGFATLAAPLYPLTKEKGKFIWTKEHQVAFETLKKTLLQAPALALPDLSKPFTLYIDERKGVARGVLTQALGPWKRPVAYLSKKLDPVASGWPSCLRAIAATATLIKDADKLTLGQKVTVVAPHALENIIRQPPDRWITNARITHYQSLLLTERVTFAPPAVLNPATLLPEADETPVHQCEEILAEEAGTWSDLTDQPWPGAETWFTNGSSFVKKGKRRAGAAVVDRRTVIWASSLPEGTSAQKAELIALIQALKLAEGKSVNIYTDSRYAFATAHVHGAIYRQRGLLTSAGRDIKNKKEILDLLVAIHLPRKVAIIHCPGHQKGTGPIEKGNQMADQMAKEAAHGPMTLIAKVGSRQDERALEKRALTEEEGLEYLTSGGSKRTADGSEFEPKKKRKV

SEQ ID NO: 971 - protein, 2113 aa, synthetic construct
  REGION 1..2113: note = Description of Artificial Sequence: Synthetic polypeptide
MKRTADGSEFESPKKKRKVDKKYSIGLDIGTNSVGWAVITDEYKVPSKKFKVLGNTDRHSIKKNLIGALLFDSGETAEATRLKRTARRRYTRRKNRICYLQEIFSNEMAKVDDSFFHRLEESFLVEEDKKHERHPIFGNIVDEVAYHEKYPTIYHLRKKLVDSTDKADLRLIYLALAHMIKFRGHFLIEGDLNPDNSDVDKLFIQLVQTYNQLFEENPINASGVDAKAILSARLSKSRRLENLIAQLPGEKKNGLFGNLIALSLGLTPNFKSNFDLAEDAKLQLSKDTYDDDLDNLLAQIGDQYADLFLAAKNLSDAILLSDILRVNTEITKAPLSASMIKRYDEHHQDLTLLKALVRQQLPEKYKEIFFDQSKNGYAGYIDGGASQEEFYKFIKPILEKMDGTEELLVKLNREDLLRKQRTFDNGSIPHQIHLGELHAILRRQEDFYPFLKDNREKIEKILTFRIPYYVGPLARGNSRFAWMTRKSEETITPWNFEEVVDKGASAQSFIERMTNFDKNLPNEKVLPKHSLLYEYFTVYNELTKVKYVTEGMRKPAFLSGEQKKAIVDLLFKTNRKVTVKQLKEDYFKKIECFDSVEISGVEDRFNASLGTYHDLLKIIKDKDFLDNEENEDILEDIVLTLTLFEDREMIEERLKTYAHLFDDKVMKQLKRRRYTGWGRLSRKLINGIRDKQSGKTILDFLKSDGFANRNFMQLIHDDSLTFKEDIQKAQVSGQGDSLHEHIANLAGSPAIKKGILQTVKVVDELVKVMGRHKPENIVIEMARENQTTQKGQKNSRERMKRIEEGIKELGSQILKEHPVENTQLQNEKLYLYYLQNGRDMYVDQELDINRLSDYDVDAIVPQSFLKDDSIDNKVLTRSDKNRGKSDNVPSEEVVKKMKNYWRQLLNAKLITQRKFDNLTKAERGGLSELDKAGFIKRQLVETRQITKHVAQILDSRMNTKYDENDKLIREVKVITLKSKLVSDFRKDFQFYKVREINNYHHAHDAYLNAVVGTALIKKYPKLESEFVYGDYKVYDVRKMIAKSEQEIGKATAKYFFYSNIMNFFKTEITLANGEIRKRPLIETNGETGEIVWDKGRDFATVRKVLSMPQVNIVKKTEVQTGGFSKESILPKRNSDKLIARKKDWDPKKYGGFDSPTVAYSVLVVAKVEKGKSKKLKSVKELLGITIMERSSFEKNPIDFLEAKGYKEVKKDLIIKLPKYSLFELENGRKRMLASAGELQKGNELALPSKYVNFLYLASHYEKLKGSPEDNEQKQLFVEQHKHYLDEIIEQISEFSKRVILADANLDKVLSAYNKHRDKPIREQAENIIHLFTLTNLGAPAAFKYFDTTIDRKRYTSTKEVLDATLIHQSITGLYETRIDLSQLGGDSGGSSGGSSGSETPGTSESATPESSGGSSGGSSVLNLEEEYRLHEKPVPSSIDPSWLQLFPTVWAERAGMGLANQVPPVVVELRSGASPVAVRQYPMSKEAREGIRPHIQRFLDLGVLVPCQSPWNTPLLPVKKPGTNDYRPVQDLREINKRVQDIHPTVPNPYNLLSSLPPSHTWYSVLDLKDAFFCLKLHPNSQPLFAFEWRDPEKGNTGQLTWTRLPQGFKNSPTLFDEALHRDLAPFRALNPQVVLLQYVDDLLVAAPTYRDCKEGTQKLLQELSKLGYRVSAKKAQLCQKEVTYLGYLLKEGKRWLTPARKATVMKIPPPTTPRQVREFLGTAGFCRLWIPGFASLAAPLYPLTKESIPFIWTEEHQKAFDRIKEALLSAPALALPDLTKPFTLYVDERAGVARGVLTQTLGPWRRPVAYLSKKLDPVASGWPTCLKAVAAVALLLKDADKLTLGQNVTVIASHSLESIVRQPPDRWMTNARMTHYQSLLLNERVSFAPPAVLNPATLLPVESEATPVHRCSEILAEETGTRRDLKDQPLPGVPAWYTDGSSFIAEGKRRAGAAIVDGKRTVWASSLPEGTSAQKAELVALTQALRLAEGKDINIYTDSRYAFATAHIHGAIYKQRGLLTSAGKDIKNKEEILALLEAIHLPKRVAIIHCPGHQKGNDPVATGNRRADEAAKQAALSTRVLAETTKPQELISGGSKRTADGSEFEPKKKRKV

SEQ ID NO: 972 - protein, 2044 aa, synthetic construct
  REGION 1..2044: note = Description of Artificial Sequence: Synthetic polypeptide
MKRTADGSEFESPKKKRKVDKKYSIGLDIGTNSVGWAVITDEYKVPSKKFKVLGNTDRHSIKKNLIGALLFDSGETAEATRLKRTARRRYTRRKNRICYLQEIFSNEMAKVDDSFFHRLEESFLVEEDKKHERHPIFGNIVDEVAYHEKYPTIYHLRKKLVDSTDKADLRLIYLALAHMIKFRGHFLIEGDLNPDNSDVDKLFIQLVQTYNQLFEENPINASGVDAKAILSARLSKSRRLENLIAQLPGEKKNGLFGNLIALSLGLTPNFKSNFDLAEDAKLQLSKDTYDDDLDNLLAQIGDQYADLFLAAKNLSDAILLSDILRVNTEITKAPLSASMIKRYDEHHQDLTLLKALVRQQLPEKYKEIFFDQSKNGYAGYIDGGASQEEFYKFIKPILEKMDGTEELLVKLNREDLLRKQRTFDNGSIPHQIHLGELHAILRRQEDFYPFLKDNREKIEKILTFRIPYYVGPLARGNSRFAWMTRKSEETITPWNFEEVVDKGASAQSFIERMTNFDKNLPNEKVLPKHSLLYEYFTVYNELTKVKYVTEGMRKPAFLSGEQKKAIVDLLFKTNRKVTVKQLKEDYFKKIECFDSVEISGVEDRFNASLGTYHDLLKIIKDKDFLDNEENEDILEDIVLTLTLFEDREMIEERLKTYAHLFDDKVMKQLKRRRYTGWGRLSRKLINGIRDKQSGKTILDFLKSDGFANRNFMQLIHDDSLTFKEDIQKAQVSGQGDSLHEHIANLAGSPAIKKGILQTVKVVDELVKVMGRHKPENIVIEMARENQTTQKGQKNSRERMKRIEEGIKELGSQILKEHPVENTQLQNEKLYLYYLQNGRDMYVDQELDINRLSDYDVDAIVPQSFLKDDSIDNKVLTRSDKNRGKSDNVPSEEVVKKMKNYWRQLLNAKLITQRKFDNLTKAERGGLSELDKAGFIKRQLVETRQITKHVAQILDSRMNTKYDENDKLIREVKVITLKSKLVSDFRKDFQFYKVREINNYHHAHDAYLNAVVGTALIKKYPKLESEFVYGDYKVYDVRKMIAKSEQEIGKATAKYFFYSNIMNFFKTEITLANGEIRKRPLIETNGETGEIVWDKGRDFATVRKVLSMPQVNIVKKTEVQTGGFSKESILPKRNSDKLIARKKDWDPKKYGGFDSPTVAYSVLVVAKVEKGKSKKLKSVKELLGITIMERSSFEKNPIDFLEAKGYKEVKKDLIIKLPKYSLFELENGRKRMLASAGELQKGNELALPSKYVNFLYLASHYEKLKGSPEDNEQKQLFVEQHKHYLDEIIEQISEFSKRVILADANLDKVLSAYNKHRDKPIREQAENIIHLFTLTNLGAPAAFKYFDTTIDRKRYTSTKEVLDATLIHQSITGLYETRIDLSQLGGDSGGSSGGSSGSETPGTSESATPESSGGSSGGSSTLKLEDEYKLHDDPRPTPENIDQWLAKYPEAWAETNGMGLAKQQPPLVISLKASVTPANVKQYPMTIEAQQGIRPHIKRLLEQGILIPCQSAWNTPLLPVKKPGGTDYRPVQDLREVNKRVEDIHPTVPNPYNLLSTLPPSHAWYTVLDLKDAFFCLKLHPSSQPLFAFEWKDPELGLSGQLTWTRLPQGFKNSPTLFDGALHQDLAAFRTQYPHLIILQYVDDILLAAETKEECLEGTGALLQELGQLGYRASAKKAQLCKKEVTYLGYQLKEGQRWLTKARQQTILSIPAPKDRKQVREFLGTAGFCRLWIPGFAEMAAPLYPLTKASEGFTWENEHQRAFENIKQALLTAPALGLPDLNKPFELYVDEKTGYAKGVLTQKLGPWRRPVAYLSKKLDPVASGWPPCLRMVAALAVLVKDAFKLTLGQPLCIRAPHALESLIRQPPDRWLSNTRMTHYQALLLDTDRIQFGSPVALNPATLLPSTEEPDHHDCLQILAEVFGTRPDLKDQPLDNADYTWYTDGSSFLKGSQRRAGAAVTSKDKVIWAKPLPEGTSAQKAELIALTQALRLAEGKSLNVYTDSRYAFATAHIHGEIYRRRGLDLSGGSKRTADGSEFEPKKKRKV

SEQ ID NO: 973 - protein, 2165 aa, synthetic construct
  REGION 1..2165: note = Description of Artificial Sequence: Synthetic polypeptide
MKRTADGSEFESPKKKRKVDKKYSIGLDIGTNSVGWAVITDEYKVPSKKFKVLGNTDRHSIKKNLIGALLFDSGETAEATRLKRTARRRYTRRKNRICYLQEIFSNEMAKVDDSFFHRLEESFLVEEDKKHERHPIFGNIVDEVAYHEKYPTIYHLRKKLVDSTDKADLRLIYLALAHMIKFRGHFLIEGDLNPDNSDVDKLFIQLVQTYNQLFEENPINASGVDAKAILSARLSKSRRLENLIAQLPGEKKNGLFGNLIALSLGLTPNFKSNFDLAEDAKLQLSKDTYDDDLDNLLAQIGDQYADLFLAAKNLSDAILLSDILRVNTEITKAPLSASMIKRYDEHHQDLTLLKALVRQQLPEKYKEIFFDQSKNGYAGYIDGGASQEEFYKFIKPILEKMDGTEELLVKLNREDLLRKQRTFDNGSIPHQIHLGELHAILRRQEDFYPFLKDNREKIEKILTFRIPYYVGPLARGNSRFAWMTRKSEETITPWNFEEVVDKGASAQSFIERMTNFDKNLPNEKVLPKHSLLYEYFTVYNELTKVKYVTEGMRKPAFLSGEQKKAIVDLLFKTNRKVTVKQLKEDYFKKIECFDSVEISGVEDRFNASLGTYHDLLKIIKDKDFLDNEENEDILEDIVLTLTLFEDREMIEERLKTYAHLFDDKVMKQLKRRRYTGWGRLSRKLINGIRDKQSGKTILDFLKSDGFANRNFMQLIHDDSLTFKEDIQKAQVSGQGDSLHEHIANLAGSPAIKKGILQTVKVVDELVKVMGRHKPENIVIEMARENQTTQKGQKNSRERMKRIEEGIKELGSQILKEHPVENTQLQNEKLYLYYLQNGRDMYVDQELDINRLSDYDVDAIVPQSFLKDDSIDNKVLTRSDKNRGKSDNVPSEEVVKKMKNYWRQLLNAKLITQRKFDNLTKAERGGLSELDKAGFIKRQLVETRQITKHVAQILDSRMNTKYDENDKLIREVKVITLKSKLVSDFRKDFQFYKVREINNYHHAHDAYLNAVVGTALIKKYPKLESEFVYGDYKVYDVRKMIAKSEQEIGKATAKYFFYSNIMNFFKTEITLANGEIRKRPLIETNGETGEIVWDKGRDFATVRKVLSMPQVNIVKKTEVQTGGFSKESILPKRNSDKLIARKKDWDPKKYGGFDSPTVAYSVLVVAKVEKGKSKKLKSVKELLGITIMERSSFEKNPIDFLEAKGYKEVKKDLIIKLPKYSLFELENGRKRMLASAGELQKGNELALPSKYVNFLYLASHYEKLKGSPEDNEQKQLFVEQHKHYLDEIIEQISEFSKRVILADANLDKVLSAYNKHRDKPIREQAENIIHLFTLTNLGAPAAFKYFDTTIDRKRYTSTKEVLDATLIHQSITGLYETRIDLSQLGGDSGGSSGGSSGSETPGTSESATPESSGGSSGGSSALSLEEEYRLFEAEPPEKSPEELQNWLREFPQAWAETAGLGLARDQPPLMISLKASATPVSIRQYPMSREAHEGIKPHIRRLLDQGVLKPCQSPWNTPLLPVKKPGTGDYRPVQDLREVNKRVEDIHPTVPNPYNLLSTLPPTHVWYTVLDLKDAFFCLRLHPQSQLLFAFEWRDPEKGSSGQLTWTRLPQGFKNSPTLFDEALHADLAGFRVEHPTLTLLQYMDDLLLVARSRTECMEGTRALLARLGQKGYRASAKKAQVCRDKVTYLGYTLSRGQRWLTGARKETIISIPPPRNPRQVREFLGTAGYCRLWIPGFAKLAAPLYPLTKPGTMFQWEEKHQKAFQQIKKALLEAPALGLPDLTKPFELFVDENSGFAKGVLVQRLGPWRRPVAYLSKKLDPVATGWPPCLRMVAAIAVLLKDAGKLTLGQPLTVLASHAVEALVRQPPDRWLSNARMTYYQALLLDSDRVNFGPIVSLNPATLLPLPSPSEEHDCLQILAEAHGTRPDLTDQPLKDPDAVWYTDGSSFLEEGERRAGAAITTESEVVWASSLPPGTSAQRAELIALTQALRMAEGKKLTVYTDSRYAFATAHVHGEIYRRRGLLTSAGKEIKNKKEILDLLKALFLPLQLSIVHCPGHQKDDSAVARGNRLADLTARTVASQPAGSSQLMAIQEPQPERDPVPYSPEDHELAKKMGSDWEQRRQAYILGDRMVMSTSHTRYMLRSGGSKRTADGSEFEPKKKRKV

SEQ ID NO: 974 - protein, 2119 aa, synthetic construct
  REGION 1..2119: note = Description of Artificial Sequence: Synthetic polypeptide
MKRTADGSEFESPKKKRKVDKKYSIGLDIGTNSVGWAVITDEYKVPSKKFKVLGNTDRHSIKKNLIGALLFDSGETAEATRLKRTARRRYTRRKNRICYLQEIFSNEMAKVDDSFFHRLEESFLVEEDKKHERHPIFGNIVDEVAYHEKYPTIYHLRKKLVDSTDKADLRLIYLALAHMIKFRGHFLIEGDLNPDNSDVDKLFIQLVQTYNQLFEENPINASGVDAKAILSARLSKSRRLENLIAQLPGEKKNGLFGNLIALSLGLTPNFKSNFDLAEDAKLQLSKDTYDDDLDNLLAQIGDQYADLFLAAKNLSDAILLSDILRVNTEITKAPLSASMIKRYDEHHQDLTLLKALVRQQLPEKYKEIFFDQSKNGYAGYIDGGASQEEFYKFIKPILEKMDGTEELLVKLNREDLLRKQRTFDNGSIPHQIHLGELHAILRRQEDFYPFLKDNREKIEKILTFRIPYYVGPLARGNSRFAWMTRKSEETITPWNFEEVVDKGASAQSFIERMTNFDKNLPNEKVLPKHSLLYEYFTVYNELTKVKYVTEGMRKPAFLSGEQKKAIVDLLFKTNRKVTVKQLKEDYFKKIECFDSVEISGVEDRFNASLGTYHDLLKIIKDKDFLDNEENEDILEDIVLTLTLFEDREMIEERLKTYAHLFDDKVMKQLKRRRYTGWGRLSRKLINGIRDKQSGKTILDFLKSDGFANRNFMQLIHDDSLTFKEDIQKAQVSGQGDSLHEHIANLAGSPAIKKGILQTVKVVDELVKVMGRHKPENIVIEMARENQTTQKGQKNSRERMKRIEEGIKELGSQILKEHPVENTQLQNEKLYLYYLQNGRDMYVDQELDINRLSDYDVDAIVPQSFLKDDSIDNKVLTRSDKNRGKSDNVPSEEVVKKMKNYWRQLLNAKLITQRKFDNLTKAERGGLSELDKAGFIKRQLVETRQITKHVAQILDSRMNTKYDENDKLIREVKVITLKSKLVSDFRKDFQFYKVREINNYHHAHDAYLNAVVGTALIKKYPKLESEFVYGDYKVYDVRKMIAKSEQEIGKATAKYFFYSNIMNFFKTEITLANGEIRKRPLIETNGETGEIVWDKGRDFATVRKVLSMPQVNIVKKTEVQTGGFSKESILPKRNSDKLIARKKDWDPKKYGGFDSPTVAYSVLVVAKVEKGKSKKLKSVKELLGITIMERSSFEKNPIDFLEAKGYKEVKKDLIIKLPKYSLFELENGRKRMLASAGELQKGNELALPSKYVNFLYLASHYEKLKGSPEDNEQKQLFVEQHKHYLDEIIEQISEFSKRVILADANLDKVLSAYNKHRDKPIREQAENIIHLFTLTNLGAPAAFKYFDTTIDRKRYTSTKEVLDATLIHQSITGLYETRIDLSQLGGDSGGSSGGSSGSETPGTSESATPESSGGSSGGSSTAPLEEEYRLFLEAPIQNVTLLEQWKREIPKVWAEINPPGLASTQAPIHVQLLSTALPVRVRQYPITLEARRSLRETIRKFRAAGILRPVHSPWNTPLLPVRKPGTSEYRMVQDLREVNKRVETIHPTVPNPYTLLSLLPPDRTWYSVLDLKDAFFCIPLAPKSQLIFAFEWTDAEEGESGQLTWTRLPQGFKNSPTLFDEALNRDLQGFRLDHPSVSLLQYVDDLLIAADTQAACLSATRDLLMTLAELGYRVSGKKAQLCQEEVTYLGFKIHKGSRTLSNSRTQAILQIPVPKTKRQVREFLGTIGYCRLWIPGFAELAQPLYAATRGGNDPLEWGEKEEEAFQSLKLALTQPPALALPSLDKPFQLFIEETGGAAKGVLTQALGPWKRPVAYLSKRLDPVAAGWPRCLRAIAAAALLTREASKLTFGQDIEITSSHNLESLLRSPPDRWLTNARITQYQVLLLDPPRVRFKQTAALNPATLLPETDDTLPIHHCLDTLDSLTSTRPDLTDQPLAQAEATLFTDGSSYIPHGKRYAGAAVVTLDSVIWAEPLPIGTSAQKAELIALTKALEWSKDKSVNIYTDSRYAFATLHVHGMIYKERGLLTAGGKAIKNAPEILALLTAVWLPKRVAVMHCRGHQKDDAPTSAGNRRADEVAREVAIRPLSIQATVFDAPDMPSGGSKRTADGSEFEPKKKRKV

SEQ ID NO: 975 - protein, 2120 aa, synthetic construct
  REGION 1..2120: note = Description of Artificial Sequence: Synthetic polypeptide
MKRTADGSEFESPKKKRKVDKKYSIGLDIGTNSVGWAVITDEYKVPSKKFKVLGNTDRHSIKKNLIGALLFDSGETAEATRLKRTARRRYTRRKNRICYLQEIFSNEMAKVDDSFFHRLEESFLVEEDKKHERHPIFGNIVDEVAYHEKYPTIYHLRKKLVDSTDKADLRLIYLALAHMIKFRGHFLIEGDLNPDNSDVDKLFIQLVQTYNQLFEENPINASGVDAKAILSARLSKSRRLENLIAQLPGEKKNGLFGNLIALSLGLTPNFKSNFDLAEDAKLQLSKDTYDDDLDNLLAQIGDQYADLFLAAKNLSDAILLSDILRVNTEITKAPLSASMIKRYDEHHQDLTLLKALVRQQLPEKYKEIFFDQSKNGYAGYIDGGASQEEFYKFIKPILEKMDGTEELLVKLNREDLLRKQRTFDNGSIPHQIHLGELHAILRRQEDFYPFLKDNREKIEKILTFRIPYYVGPLARGNSRFAWMTRKSEETITPWNFEEVVDKGASAQSFIERMTNFDKNLPNEKVLPKHSLLYEYFTVYNELTKVKYVTEGMRKPAFLSGEQKKAIVDLLFKTNRKVTVKQLKEDYFKKIECFDSVEISGVEDRFNASLGTYHDLLKIIKDKDFLDNEENEDILEDIVLTLTLFEDREMIEERLKTYAHLFDDKVMKQLKRRRYTGWGRLSRKLINGIRDKQSGKTILDFLKSDGFANRNFMQLIHDDSLTFKEDIQKAQVSGQGDSLHEHIANLAGSPAIKKGILQTVKVVDELVKVMGRHKPENIVIEMARENQTTQKGQKNSRERMKRIEEGIKELGSQILKEHPVENTQLQNEKLYLYYLQNGRDMYVDQELDINRLSDYDVDAIVPQSFLKDDSIDNKVLTRSDKNRGKSDNVPSEEVVKKMKNYWRQLLNAKLITQRKFDNLTKAERGGLSELDKAGFIKRQLVETRQITKHVAQILDSRMNTKYDENDKLIREVKVITLKSKLVSDFRKDFQFYKVREINNYHHAHDAYLNAVVGTALIKKYPKLESEFVYGDYKVYDVRKMIAKSEQEIGKATAKYFFYSNIMNFFKTEITLANGEIRKRPLIETNGETGEIVWDKGRDFATVRKVLSMPQVNIVKKTEVQTGGFSKESILPKRNSDKLIARKKDWDPKKYGGFDSPTVAYSVLVVAKVEKGKSKKLKSVKELLGITIMERSSFEKNPIDFLEAKGYKEVKKDLIIKLPKYSLFELENGRKRMLASAGELQKGNELALPSKYVNFLYLASHYEKLKGSPEDNEQKQLFVEQHKHYLDEIIEQISEFSKRVILADANLDKVLSAYNKHRDKPIREQAENIIHLFTLTNLGAPAAFKYFDTTIDRKRYTSTKEVLDATLIHQSITGLYETRIDLSQLGGDSGGSSGGSSGSETPGTSESATPESSGGSSGGSSTCPLSEESRLLPLTFSPDRPSTTSTPTSLTLLNHFKGLVPGVWAETNPFGLAGHQPPVVVQLSSTATPACVQQYPLTRAALLGIKPHIDRLLAAGILRPCQSSWNTPLLPVRKPGSGDFRPVQDLREVNARVETVHPTVPNPYTLLSSLDPARTWYTVLDLKDAFFSIPLAPVSQPIFAFTWTDPNTGTSSQLTWTRLPQGFKNSPTLFGSALASDLAAFRVSYPEVTLLQYVDDLLLATSSEAICKDATLHLLQLLEASGYRISGKKAQLCSQSVVYLGFTLRSGQRLLSRGRVAAILGMPAPRNRRGLREFLGMAGYCRLWILGFAEVAKPLYEALTGEPTQFVWGPRQQEAFDKLRKALSSTPALSLPDLSKPFRLYVSESRAVAKGVLTQPLGPWNRPVAYLSKQLDPVASGWPSCLRTVAAIAVLVREAAKLTFGQPLEISASHHLEQLLHSPPTRWISNSRLTHYQSLLLDSARISFAPPVTLNPATLLPDSPPSSPIHDCLDTLDSIHTSRPGLTDVPLTNPDLVLFTDGSSFVQEGIRRAGAAVVTPVETLWDTALPPGTSAQRAELIALTQALRLSAGRRVNIYTDSRYAFATVHIHGYVYLQRGLLTSAGREIRNKSQIQDLLDAVWLPKEVAVIHVPAHTRGTDPQSLGNAAADKAARAAACKPLIPAMSGGSKRTADGSEFEPKKKRKV

SEQ ID NO: 976 - protein, 2111 aa, synthetic construct
  REGION 1..2111: note = Description of Artificial Sequence: Synthetic polypeptide
MKRTADGSEFESPKKKRKVDKKYSIGLDIGTNSVGWAVITDEYKVPSKKFKVLGNTDRHSIKKNLIGALLFDSGETAEATRLKRTARRRYTRRKNRICYLQEIFSNEMAKVDDSFFHRLEESFLVEEDKKHERHPIFGNIVDEVAYHEKYPTIYHLRKKLVDSTDKADLRLIYLALAHMIKFRGHFLIEGDLNPDNSDVDKLFIQLVQTYNQLFEENPINASGVDAKAILSARLSKSRRLENLIAQLPGEKKNGLFGNLIALSLGLTPNFKSNFDLAEDAKLQLSKDTYDDDLDNLLAQIGDQYADLFLAAKNLSDAILLSDILRVNTEITKAPLSASMIKRYDEHHQDLTLLKALVRQQLPEKYKEIFFDQSKNGYAGYIDGGASQEEFYKFIKPILEKMDGTEELLVKLNREDLLRKQRTFDNGSIPHQIHLGELHAILRRQEDFYPFLKDNREKIEKILTFRIPYYVGPLARGNSRFAWMTRKSEETITPWNFEEVVDKGASAQSFIERMTNFDKNLPNEKVLPKHSLLYEYFTVYNELTKVKYVTEGMRKPAFLSGEQKKAIVDLLFKTNRKVTVKQLKEDYFKKIECFDSVEISGVEDRFNASLGTYHDLLKIIKDKDFLDNEENEDILEDIVLTLTLFEDREMIEERLKTYAHLFDDKVMKQLKRRRYTGWGRLSRKLINGIRDKQSGKTILDFLKSDGFANRNFMQLIHDDSLTFKEDIQKAQVSGQGDSLHEHIANLAGSPAIKKGILQTVKVVDELVKVMGRHKPENIVIEMARENQTTQKGQKNSRERMKRIEEGIKELGSQILKEHPVENTQLQNEKLYLYYLQNGRDMYVDQELDINRLSDYDVDAIVPQSFLKDDSIDNKVLTRSDKNRGKSDNVPSEEVVKKMKNYWRQLLNAKLITQRKFDNLTKAERGGLSELDKAGFIKRQLVETRQITKHVAQILDSRMNTKYDENDKLIREVKVITLKSKLVSDFRKDFQFYKVREINNYHHAHDAYLNAVVGTALIKKYPKLESEFVYGDYKVYDVRKMIAKSEQEIGKATAKYFFYSNIMNFFKTEITLANGEIRKRPLIETNGETGEIVWDKGRDFATVRKVLSMPQVNIVKKTEVQTGGFSKESILPKRNSDKLIARKKDWDPKKYGGFDSPTVAYSVLVVAKVEKGKSKKLKSVKELLGITIMERSSFEKNPIDFLEAKGYKEVKKDLIIKLPKYSLFELENGRKRMLASAGELQKGNELALPSKYVNFLYLASHYEKLKGSPEDNEQKQLFVEQHKHYLDEIIEQISEFSKRVILADANLDKVLSAYNKHRDKPIREQAENIIHLFTLTNLGAPAAFKYFDTTIDRKRYTSTKEVLDATLIHQSITGLYETRIDLSQLGGDSGGSSGGSSGSETPGTSESATPESSGGSSGGSSTTLVPLQEYQERLLKQTALPNKEKTMLQSLFLRYDALWQHWENQVGHRRIKPHHIATGTVPPRPQKQYPINPKAKPSIQVVINDLLKQGVLVQQNSTMNTPIYPVPKPDGKWRMVLDYREVNKTIPLIAAQNQHSAGILSSIFRGKYKTTLDLSNGFWAHPITPESYWLTAFTWQGQQYCWTRLPQGFLNSPALFTADVVDLLKEIPNVQAYVDDIYISHDDPVEHVQQLEKVFSLLLNAGYVVSLKKSEIAKHEVEFLGFNITKEGRGLTDTFKQKLLNITPPKDLKQLQSILGLLNFARNFIANFSELVRPLYNIVSSANGKYITWTQENSQQLQNIISTLNSAKNLQERNPEVRLVMKVNTSPSAGYIRFYNEATKQPIMYLNYVYSKAETKFTMTEKLLTTIHKGLIKALDLAMGQEILVYSPIVSMTKIQKTPLPERKALPIRWITWMSYLEDPRIQFYYDKTLPELLQVPKVTEDEIAKTKHPSEFNMVFYTDGSAIKHPNIKKSHSAGMGIAQVQFKPDFTIVNTWSIPLGDHTAQMAEIAAVEFACKKALKITGPVLVVTDSFYVAESANKELPYWQSNGFVNNKKKPLKHVSKWKSIAECLQLKPDIVIMHEKGHQPSNTTFHTEGNNLADKLATQGSYVVNTNTTPSLDAELDQLLQGHTPSGGSKRTADGSEFEPKKKRKV

SEQ ID NO: 977 - protein, 2111 aa, synthetic construct
  REGION 1..2111: note = Description of Artificial Sequence: Synthetic polypeptide
MKRTADGSEFESPKKKRKVDKKYSIGLDIGTNSVGWAVITDEYKVPSKKFKVLGNTDRHSIKKNLIGALLFDSGETAEATRLKRTARRRYTRRKNRICYLQEIFSNEMAKVDDSFFHRLEESFLVEEDKKHERHPIFGNIVDEVAYHEKYPTIYHLRKKLVDSTDKADLRLIYLALAHMIKFRGHFLIEGDLNPDNSDVDKLFIQLVQTYNQLFEENPINASGVDAKAILSARLSKSRRLENLIAQLPGEKKNGLFGNLIALSLGLTPNFKSNFDLAEDAKLQLSKDTYDDDLDNLLAQIGDQYADLFLAAKNLSDAILLSDILRVNTEITKAPLSASMIKRYDEHHQDLTLLKALVRQQLPEKYKEIFFDQSKNGYAGYIDGGASQEEFYKFIKPILEKMDGTEELLVKLNREDLLRKQRTFDNGSIPHQIHLGELHAILRRQEDFYPFLKDNREKIEKILTFRIPYYVGPLARGNSRFAWMTRKSEETITPWNFEEVVDKGASAQSFIERMTNFDKNLPNEKVLPKHSLLYEYFTVYNELTKVKYVTEGMRKPAFLSGEQKKAIVDLLFKTNRKVTVKQLKEDYFKKIECFDSVEISGVEDRFNASLGTYHDLLKIIKDKDFLDNEENEDILEDIVLTLTLFEDREMIEERLKTYAHLFDDKVMKQLKRRRYTGWGRLSRKLINGIRDKQSGKTILDFLKSDGFANRNFMQLIHDDSLTFKEDIQKAQVSGQGDSLHEHIANLAGSPAIKKGILQTVKVVDELVKVMGRHKPENIVIEMARENQTTQKGQKNSRERMKRIEEGIKELGSQILKEHPVENTQLQNEKLYLYYLQNGRDMYVDQELDINRLSDYDVDAIVPQSFLKDDSIDNKVLTRSDKNRGKSDNVPSEEVVKKMKNYWRQLLNAKLITQRKFDNLTKAERGGLSELDKAGFIKRQLVETRQITKHVAQILDSRMNTKYDENDKLIREVKVITLKSKLVSDFRKDFQFYKVREINNYHHAHDAYLNAVVGTALIKKYPKLESEFVYGDYKVYDVRKMIAKSEQEIGKATAKYFFYSNIMNFFKTEITLANGEIRKRPLIETNGETGEIVWDKGRDFATVRKVLSMPQVNIVKKTEVQTGGFSKESILPKRNSDKLIARKKDWDPKKYGGFDSPTVAYSVLVVAKVEKGKSKKLKSVKELLGITIMERSSFEKNPIDFLEAKGYKEVKKDLIIKLPKYSLFELENGRKRMLASAGELQKGNELALPSKYVNFLYLASHYEKLKGSPEDNEQKQLFVEQHKHYLDEIIEQISEFSKRVILADANLDKVLSAYNKHRDKPIREQAENIIHLFTLTNLGAPAAFKYFDTTIDRKRYTSTKEVLDATLIHQSITGLYETRIDLSQLGGDSGGSSGGSSGSETPGTSESATPESSGGSSGGSSTVLVPLHEYQERLLQQTALPKEQKELLQKLFLKYDALWQHWENQVGHRRIKPHNIATGTLAPRPQKQYPINPKAKPSIQIVIDDLLKQGVLIQQNSTMNTPVYPVPKPDGKWRMVLDYREVNKTIPLIAAQNQHSAGILSSIYRGKYKTTLDLTNGFWAHPITPESYWLTAFTWQGKQYCWTRLPQGFLNSPALFTADVVDLLKEIPNVQAYVDDIYISHDDPQEHLEQLEKIFSILLNAGYVVSLKKSEIAQREVEFLGFNITKEGRGLTDTFKQKLLNITPPKDLKQLQSILGLLNFARNFIPNYSELVKPLYTIVANANGKFISWTEDNSNQLQHIISVLNQADNLEERNPETRLIIKVNSSPSAGYIRYYNEGSKRPIMYVNYIFSKAEAKFTQTEKLLTTMHKGLIKAMDLAMGQEILVYSPIVSMTKIQRTPLPERKALPVRWITWMTYLEDPRIQFHYDKSLPELQQIPNVTEDVIAKTKHPSEFAMVFYTDGSAIKHPDVNKSHSAGMGIAQVQFIPEYKIVHQWSIPLGDHTAQLAEIAAVEFACKKALKISGPVLIVTDSFYVAESANKELPYWKSNGFLNNKKKPLRHVSKWKSIAECLQLKPDIIIMHEKGHQQPMTTLHTEGNNLADKLATQGSYVVHCNTTPSLDAELDQLLQGHYPSGGSKRTADGSEFEPKKKRKV

SEQ ID NO: 978 - protein, 2105 aa, synthetic construct
  REGION 1..2105: note = Description of Artificial Sequence: Synthetic polypeptide
MKRTADGSEFESPKKKRKVDKKYSIGLDIGTNSVGWAVITDEYKVPSKKFKVLGNTDRHSIKKNLIGALLFDSGETAEATRLKRTARRRYTRRKNRICYLQEIFSNEMAKVDDSFFHRLEESFLVEEDKKHERHPIFGNIVDEVAYHEKYPTIYHLRKKLVDSTDKADLRLIYLALAHMIKFRGHFLIEGDLNPDNSDVDKLFIQLVQTYNQLFEENPINASGVDAKAILSARLSKSRRLENLIAQLPGEKKNGLFGNLIALSLGLTPNFKSNFDLAEDAKLQLSKDTYDDDLDNLLAQIGDQYADLFLAAKNLSDAILLSDILRVNTEITKAPLSASMIKRYDEHHQDLTLLKALVRQQLPEKYKEIFFDQSKNGYAGYIDGGASQEEFYKFIKPILEKMDGTEELLVKLNREDLLRKQRTFDNGSIPHQIHLGELHAILRRQEDFYPFLKDNREKIEKILTFRIPYYVGPLARGNSRFAWMTRKSEETITPWNFEEVVDKGASAQSFIERMTNFDKNLPNEKVLPKHSLLYEYFTVYNELTKVKYVTEGMRKPAFLSGEQKKAIVDLLFKTNRKVTVKQLKEDYFKKIECFDSVEISGVEDRFNASLGTYHDLLKIIKDKDFLDNEENEDILEDIVLTLTLFEDREMIEERLKTYAHLFDDKVMKQLKRRRYTGWGRLSRKLINGIRDKQSGKTILDFLKSDGFANRNFMQLIHDDSLTFKEDIQKAQVSGQGDSLHEHIANLAGSPAIKKGILQTVKVVDELVKVMGRHKPENIVIEMARENQTTQKGQKNSRERMKRIEEGIKELGSQILKEHPVENTQLQNEKLYLYYLQNGRDMYVDQELDINRLSDYDVDAIVPQSFLKDDSIDNKVLTRSDKNRGKSDNVPSEEVVKKMKNYWRQLLNAKLITQRKFDNLTKAERGGLSELDKAGFIKRQLVETRQITKHVAQILDSRMNTKYDENDKLIREVKVITLKSKLVSDFRKDFQFYKVREINNYHHAHDAYLNAVVGTALIKKYPKLESEFVYGDYKVYDVRKMIAKSEQEIGKATAKYFFYSNIMNFFKTEITLANGEIRKRPLIETNGETGEIVWDKGRDFATVRKVLSMPQVNIVKKTEVQTGGFSKESILPKRNSDKLIARKKDWDPKKYGGFDSPTVAYSVLVVAKVEKGKSKKLKSVKELLGITIMERSSFEKNPIDFLEAKGYKEVKKDLIIKLPKYSLFELENGRKRMLASAGELQKGNELALPSKYVNFLYLASHYEKLKGSPEDNEQKQLFVEQHKHYLDEIIEQISEFSKRVILADANLDKVLSAYNKHRDKPIREQAENIIHLFTLTNLGAPAAFKYFDTTIDRKRYTSTKEVLDATLIHQSITGLYETRIDLSQLGGDSGGSSGGSSGSETPGTSESATPESSGGSSGGSSTVLLPPTYHKQLSCQTKNTLNIDEYLLQFPDQLWASLPTDIGRMLVPPITIKIKDNASLPSIRQYPLPKDKTEGLRPLISSLENQGILIKCHSPCNTPIFPIKKAGRDEYRMIHDLRAINNIVAPLTAVVASPTTVLSNLAPSLHWFTVIDLSNAFFSVPIHKDSQYLFAFTFEGHQYTWTVLPQGFIHSPTLFSQALYQSLHKIKFKISSEICIYMDDVLIASKDRDTNLKDTAVMLQHLASEGHKVSKKKLQLCQQEVVYLGQLLTPEGRKILPDRKVTVSQFQQPTTIRQIRAFLGLVGYCRHWIPEFSIHSKFLEKQLKKDTAEPFQLDDQQVEAFNKLKHAITTAPVLVVPDPAKPFQLYTSHSEHASIAVLTQKHAGRTRPIAFLSSKFDAIESGLPPCLKACASIHRSLTQADSFILGAPLIIYTTHAICTLLQRDRSQLVTASRFSKWEADLLRPELTFVACSAVSPAHLYMQSCENNIPPHDCVLLTHTISRPRPDLSDLPIPDPDMTLFSDGSYTTGRGGAAVVMHRPVTDDFIIIHQQPGGASAQTAELLALAAACHLATDKTVNIYTDSRYAYGVVHDFGHLWMHRGFVTSAGTPIKNHKEIEYLLKQIMKPKQVSVIKIEAHTKGVSMEVRGNAAADEAAKNAVFLVQRVLKSGGSKRTADGSEFEPKKKRKV

SEQ ID NO: 979 - protein, 1691 aa, synthetic construct
  REGION 1..1691: note = Description of Artificial Sequence: Synthetic polypeptide
MKRTADGSEFESPKKKRKVDKKYSIGLDIGTNSVGWAVITDEYKVPSKKFKVLGNTDRHSIKKNLIGALLFDSGETAEATRLKRTARRRYTRRKNRICYLQEIFSNEMAKVDDSFFHRLEESFLVEEDKKHERHPIFGNIVDEVAYHEKYPTIYHLRKKLVDSTDKADLRLIYLALAHMIKFRGHFLIEGDLNPDNSDVDKLFIQLVQTYNQLFEENPINASGVDAKAILSARLSKSRRLENLIAQLPGEKKNGLFGNLIALSLGLTPNFKSNFDLAEDAKLQLSKDTYDDDLDNLLAQIGDQYADLFLAAKNLSDAILLSDILRVNTEITKAPLSASMIKRYDEHHQDLTLLKALVRQQLPEKYKEIFFDQSKNGYAGYIDGGASQEEFYKFIKPILEKMDGTEELLVKLNREDLLRKQRTFDNGSIPHQIHLGELHAILRRQEDFYPFLKDNREKIEKILTFRIPYYVGPLARGNSRFAWMTRKSEETITPWNFEEVVDKGASAQSFIERMTNFDKNLPNEKVLPKHSLLYEYFTVYNELTKVKYVTEGMRKPAFLSGEQKKAIVDLLFKTNRKVTVKQLKEDYFKKIECFDSVEISGVEDRFNASLGTYHDLLKIIKDKDFLDNEENEDILEDIVLTLTLFEDREMIEERLKTYAHLFDDKVMKQLKRRRYTGWGRLSRKLINGIRDKQSGKTILDFLKSDGFANRNFMQLIHDDSLTFKEDIQKAQVSGQGDSLHEHIANLAGSPAIKKGILQTVKVVDELVKVMGRHKPENIVIEMARENQTTQKGQKNSRERMKRIEEGIKELGSQILKEHPVENTQLQNEKLYLYYLQNGRDMYVDQELDINRLSDYDVDAIVPQSFLKDDSIDNKVLTRSDKNRGKSDNVPSEEVVKKMKNYWRQLLNAKLITQRKFDNLTKAERGGLSELDKAGFIKRQLVETRQITKHVAQILDSRMNTKYDENDKLIREVKVITLKSKLVSDFRKDFQFYKVREINNYHHAHDAYLNAVVGTALIKKYPKLESEFVYGDYKVYDVRKMIAKSEQEIGKATAKYFFYSNIMNFFKTEITLANGEIRKRPLIETNGETGEIVWDKGRDFATVRKVLSMPQVNIVKKTEVQTGGFSKESILPKRNSDKLIARKKDWDPKKYGGFDSPTVAYSVLVVAKVEKGKSKKLKSVKELLGITIMERSSFEKNPIDFLEAKGYKEVKKDLIIKLPKYSLFELENGRKRMLASAGELQKGNELALPSKYVNFLYLASHYEKLKGSPEDNEQKQLFVEQHKHYLDEIIEQISEFSKRVILADANLDKVLSAYNKHRDKPIREQAENIIHLFTLTNLGAPAAFKYFDTTIDRKRYTSTKEVLDATLIHQSITGLYETRIDLSQLGGDSGGSSGGSSGSETPGTSESATPESSGGSSGGSSDKWIHKFEIKEGRWVYVPSEKTREIGGKIHFYIKHKWNYPLYMYHLRKGGHVAAANRHIKKQYFSLIDISDFFGSTSQSRVTRELGKLIPYAKAREIAKLSTVRSPPSNGLKHVIPYGYPQSPILATLCFHQSFCGKLINIISKSGQISVSIYMDDILLSSDDLSQLEIAFNSVKAALAKSGYCINERKTQSPSTMVKVFNLELSQQSLRVSPKRIVEFLQAYISSKNAAERKGIASYVGSVNKSQSTIFKSGGSKRTADGSEFEPKKKRKV

SEQ ID NO: 980 - protein, 1689 aa, synthetic construct
  REGION 1..1689: note = Description of Artificial Sequence: Synthetic polypeptide
MKRTADGSEFESPKKKRKVDKKYSIGLDIGTNSVGWAVITDEYKVPSKKFKVLGNTDRHSIKKNLIGALLFDSGETAEATRLKRTARRRYTRRKNRICYLQEIFSNEMAKVDDSFFHRLEESFLVEEDKKHERHPIFGNIVDEVAYHEKYPTIYHLRKKLVDSTDKADLRLIYLALAHMIKFRGHFLIEGDLNPDNSDVDKLFIQLVQTYNQLFEENPINASGVDAKAILSARLSKSRRLENLIAQLPGEKKNGLFGNLIALSLGLTPNFKSNFDLAEDAKLQLSKDTYDDDLDNLLAQIGDQYADLFLAAKNLSDAILLSDILRVNTEITKAPLSASMIKRYDEHHQDLTLLKALVRQQLPEKYKEIFFDQSKNGYAGYIDGGASQEEFYKFIKPILEKMDGTEELLVKLNREDLLRKQRTFDNGSIPHQIHLGELHAILRRQEDFYPFLKDNREKIEKILTFRIPYYVGPLARGNSRFAWMTRKSEETITPWNFEEVVDKGASAQSFIERMTNFDKNLPNEKVLPKHSLLYEYFTVYNELTKVKYVTEGMRKPAFLSGEQKKAIVDLLFKTNRKVTVKQLKEDYFKKIECFDSVEISGVEDRFNASLGTYHDLLKIIKDKDFLDNEENEDILEDIVLTLTLFEDREMIEERLKTYAHLFDDKVMKQLKRRRYTGWGRLSRKLINGIRDKQSGKTILDFLKSDGFANRNFMQLIHDDSLTFKEDIQKAQVSGQGDSLHEHIANLAGSPAIKKGILQTVKVVDELVKVMGRHKPENIVIEMARENQTTQKGQKNSRERMKRIEEGIKELGSQILKEHPVENTQLQNEKLYLYYLQNGRDMYVDQELDINRLSDYDVDAIVPQSFLKDDSIDNKVLTRSDKNRGKSDNVPSEEVVKKMKNYWRQLLNAKLITQRKFDNLTKAERGGLSELDKAGFIKRQLVETRQITKHVAQILDSRMNTKYDENDKLIREVKVITLKSKLVSDFRKDFQFYKVREINNYHHAHDAYLNAVVGTALIKKYPKLESEFVYGDYKVYDVRKMIAKSEQEIGKATAKYFFYSNIMNFFKTEITLANGEIRKRPLIETNGETGEIVWDKGRDFATVRKVLSMPQVNIVKKTEVQTGGFSKESILPKRNSDKLIARKKDWDPKKYGGFDSPTVAYSVLVVAKVEKGKSKKLKSVKELLGITIMERSSFEKNPIDFLEAKGYKEVKKDLIIKLPKYSLFELENGRKRMLASAGELQKGNELALPSKYVNFLYLASHYEKLKGSPEDNEQKQLFVEQHKHYLDEIIEQISEFSKRVILADANLDKVLSAYNKHRDKPIREQAENIIHLFTLTNLGAPAAFKYFDTTIDRKRYTSTKEVLDATLIHQSITGLYETRIDLSQLGGDSGGSSGGSSGSETPGTSESATPESSGGSSGGSSKRWEHRFQVKSGRWVFVPTPASRAVGEQIRARVAKAWSPPAFYYHLRKGGHVAALRAHADSTYFFRCDLKNFFGSINLSRVTRCLKRYFSYVEARGMASASVVIAPGATKTMLPYGFVQSPLLASLALDQSRAGAYLRKLSAQEGITVSVYMDDIVVSSLEIGLLDKIKAELGEKAEKAGISLNQEKTEGPSTLVTVFNVELSHNSLVISEERMAEFREALMIASCDAVAMGILGYVASVNDAQLSKLYSGGSKRTADGSEFEPKKKRKV

SEQ ID NO: 981 - protein, 1695 aa, synthetic construct
  REGION 1..1695: note = Description of Artificial Sequence: Synthetic polypeptide
MKRTADGSEFESPKKKRKVDKKYSIGLDIGTNSVGWAVITDEYKVPSKKFKVLGNTDRHSIKKNLIGALLFDSGETAEATRLKRTARRRYTRRKNRICYLQEIFSNEMAKVDDSFFHRLEESFLVEEDKKHERHPIFGNIVDEVAYHEKYPTIYHLRKKLVDSTDKADLRLIYLALAHMIKFRGHFLIEGDLNPDNSDVDKLFIQLVQTYNQLFEENPINASGVDAKAILSARLSKSRRLENLIAQLPGEKKNGLFGNLIALSLGLTPNFKSNFDLAEDAKLQLSKDTYDDDLDNLLAQIGDQYADLFLAAKNLSDAILLSDILRVNTEITKAPLSASMIKRYDEHHQDLTLLKALVRQQLPEKYKEIFFDQSKNGYAGYIDGGASQEEFYKFIKPILEKMDGTEELLVKLNREDLLRKQRTFDNGSIPHQIHLGELHAILRRQEDFYPFLKDNREKIEKILTFRIPYYVGPLARGNSRFAWMTRKSEETITPWNFEEVVDKGASAQSFIERMTNFDKNLPNEKVLPKHSLLYEYFTVYNELTKVKYVTEGMRKPAFLSGEQKKAIVDLLFKTNRKVTVKQLKEDYFKKIECFDSVEISGVEDRFNASLGTYHDLLKIIKDKDFLDNEENEDILEDIVLTLTLFEDREMIEERLKTYAHLFDDKVMKQLKRRRYTGWGRLSRKLINGIRDKQSGKTILDFLKSDGFANRNFMQLIHDDSLTFKEDIQKAQVSGQGDSLHEHIANLAGSPAIKKGILQTVKVVDELVKVMGRHKPENIVIEMARENQTTQKGQKNSRERMKRIEEGIKELGSQILKEHPVENTQLQNEKLYLYYLQNGRDMYVDQELDINRLSDYDVDAIVPQSFLKDDSIDNKVLTRSDKNRGKSDNVPSEEVVKKMKNYWRQLLNAKLITQRKFDNLTKAERGGLSELDKAGFIKRQLVETRQITKHVAQILDSRMNTKYDENDKLIREVKVITLKSKLVSDFRKDFQFYKVREINNYHHAHDAYLNAVVGTALIKKYPKLESEFVYGDYKVYDVRKMIAKSEQEIGKATAKYFFYSNIMNFFKTEITLANGEIRKRPLIETNGETGEIVWDKGRDFATVRKVLSMPQVNIVKKTEVQTGGFSKESILPKRNSDKLIARKKDWDPKKYGGFDSPTVAYSVLVVAKVEKGKSKKLKSVKELLGITIMERSSFEKNPIDFLEAKGYKEVKKDLIIKLPKYSLFELENGRKRMLASAGELQKGNELALPSKYVNFLYLASHYEKLKGSPEDNEQKQLFVEQHKHYLDEIIEQISEFSKRVILADANLDKVLSAYNKHRDKPIREQAENIIHLFTLTNLGAPAAFKYFDTTIDRKRYTSTKEVLDATLIHQSITGLYETRIDLSQLGGDSGGSSGGSSGSETPGTSESATPESSGGSSGGSSSNMAPRWINKFEIKPNVWVYEPSEACREEGAEILRFINRKWKIPTYYYHLRRGGHVEALRVHIENDWFVSLDIKEFFQSTSRSRVTRTLRNFLPYEKARIIAKVSTVSNFTNDKFSHFIPFGYVQSPLLATICLHYSSFGQLIKELSRCEDVKLSVYMDDIILSSSSLELLERTKTLLEESASRSHYKLNTLKVQGPAERITAFNIDLSHQSMVISPKRLLSFLVDFNSPDSDNLKREGIRSYIYSVNSEQAEYFSGGSKRTADGSEFEPKKKRKV

SEQ ID NO: 982 - protein, 1695 aa, synthetic construct
  REGION 1..1695: note = Description of Artificial Sequence: Synthetic polypeptide
MKRTADGSEFESPKKKRKVDKKYSIGLDIGTNSVGWAVITDEYKVPSKKFKVLGNTDRHSIKKNLIGALLFDSGETAEATRLKRTARRRYTRRKNRICYLQEIFSNEMAKVDDSFFHRLEESFLVEEDKKHERHPIFGNIVDEVAYHEKYPTIYHLRKKLVDSTDKADLRLIYLALAHMIKFRGHFLIEGDLNPDNSDVDKLFIQLVQTYNQLFEENPINASGVDAKAILSARLSKSRRLENLIAQLPGEKKNGLFGNLIALSLGLTPNFKSNFDLAEDAKLQLSKDTYDDDLDNLLAQIGDQYADLFLAAKNLSDAILLSDILRVNTEITKAPLSASMIKRYDEHHQDLTLLKALVRQQLPEKYKEIFFDQSKNGYAGYIDGGASQEEFYKFIKPILEKMDGTEELLVKLNREDLLRKQRTFDNGSIPHQIHLGELHAILRRQEDFYPFLKDNREKIEKILTFRIPYYVGPLARGNSRFAWMTRKSEETITPWNFEEVVDKGASAQSFIERMTNFDKNLPNEKVLPKHSLLYEYFTVYNELTKVKYVTEGMRKPAFLSGEQKKAIVDLLFKTNRKVTVKQLKEDYFKKIECFDSVEISGVEDRFNASLGTYHDLLKIIKDKDFLDNEENEDILEDIVLTLTLFEDREMIEERLKTYAHLFDDKVMKQLKRRRYTGWGRLSRKLINGIRDKQSGKTILDFLKSDGFANRNFMQLIHDDSLTFKEDIQKAQVSGQGDSLHEHIANLAGSPAIKKGILQTVKVVDELVKVMGRHKPENIVIEMARENQTTQKGQKNSRERMKRIEEGIKELGSQILKEHPVENTQLQNEKLYLYYLQNGRDMYVDQELDINRLSDYDVDAIVPQSFLKDDSIDNKVLTRSDKNRGKSDNVPSEEVVKKMKNYWRQLLNAKLITQRKFDNLTKAERGGLSELDKAGFIKRQLVETRQITKHVAQILDSRMNTKYDENDKLIREVKVITLKSKLVSDFRKDFQFYKVREINNYHHAHDAYLNAVVGTALIKKYPKLESEFVYGDYKVYDVRKMIAKSEQEIGKATAKYFFYSNIMNFFKTEITLANGEIRKRPLIETNGETGEIVWDKGRDFATVRKVLSMPQVNIVKKTEVQTGGFSKESILPKRNSDKLIARKKDWDPKKYGGFDSPTVAYSVLVVAKVEKGKSKKLKSVKELLGITIMERSSFEKNPIDFLEAKGYKEVKKDLIIKLPKYSLFELENGRKRMLASAGELQKGNELALPSKYVNFLYLASHYEKLKGSPEDNEQKQLFVEQHKHYLDEIIEQISEFSKRVILADANLDKVLSAYNKHRDKPIREQAENIIHLFTLTNLGAPAAFKYFDTTIDRKRYTSTKEVLDATLIHQSITGLYETRIDLSQLGGDSGGSSGGSSGSETPGTSESATPESSGGSSGGSSTLELQRWKHKFEIKPGVWVFAPSPEAVKNGSKILNAVRKHWNPPLYFFHLRTGGHLKATRLHLKNTYFAVVDIKQFFLSTSRSRVTRCLNEYFSYEKAREISRYSTVKNPSSGLHKYVLPFGFVQSPILATLCLDKSYLGSLLRKLSRKGTMKLSIYMDDVIISSNDFQTLQTTYQEILQAMEKSGYKLNLKKSQPPSNKIVVFNISLRHGNMSVTAERLSEFLIDFYASNDEQHKLGIANYVRSVNLEQAKLFRSGGSKRTADGSEFEPKKKRKV

SEQ ID NO: 983 - protein, 1692 aa, synthetic construct
  REGION 1..1692: note = Description of Artificial Sequence: Synthetic polypeptide
MKRTADGSEFESPKKKRKVDKKYSIGLDIGTNSVGWAVITDEYKVPSKKFKVLGNTDRHSIKKNLIGALLFDSGETAEATRLKRTARRRYTRRKNRICYLQEIFSNEMAKVDDSFFHRLEESFLVEEDKKHERHPIFGNIVDEVAYHEKYPTIYHLRKKLVDSTDKADLRLIYLALAHMIKFRGHFLIEGDLNPDNSDVDKLFIQLVQTYNQLFEENPINASGVDAKAILSARLSKSRRLENLIAQLPGEKKNGLFGNLIALSLGLTPNFKSNFDLAEDAKLQLSKDTYDDDLDNLLAQIGDQYADLFLAAKNLSDAILLSDILRVNTEITKAPLSASMIKRYDEHHQDLTLLKALVRQQLPEKYKEIFFDQSKNGYAGYIDGGASQEEFYKFIKPILEKMDGTEELLVKLNREDLLRKQRTFDNGSIPHQIHLGELHAILRRQEDFYPFLKDNREKIEKILTFRIPYYVGPLARGNSRFAWMTRKSEETITPWNFEEVVDKGASAQSFIERMTNFDKNLPNEKVLPKHSLLYEYFTVYNELTKVKYVTEGMRKPAFLSGEQKKAIVDLLFKTNRKVTVKQLKEDYFKKIECFDSVEISGVEDRFNASLGTYHDLLKIIKDKDFLDNEENEDILEDIVLTLTLFEDREMIEERLKTYAHLFDDKVMKQLKRRRYTGWGRLSRKLINGIRDKQSGKTILDFLKSDGFANRNFMQLIHDDSLTFKEDIQKAQVSGQGDSLHEHIANLAGSPAIKKGILQTVKVVDELVKVMGRHKPENIVIEMARENQTTQKGQKNSRERMKRIEEGIKELGSQILKEHPVENTQLQNEKLYLYYLQNGRDMYVDQELDINRLSDYDVDAIVPQSFLKDDSIDNKVLTRSDKNRGKSDNVPSEEVVKKMKNYWRQLLNAKLITQRKFDNLTKAERGGLSELDKAGFIKRQLVETRQITKHVAQILDSRMNTKYDENDKLIREVKVITLKSKLVSDFRKDFQFYKVREINNYHHAHDAYLNAVVGTALIKKYPKLESEFVYGDYKVYDVRKMIAKSEQEIGKATAKYFFYSNIMNFFKTEITLANGEIRKRPLIETNGETGEIVWDKGRDFATVRKVLSMPQVNIVKKTEVQTGGFSKESILPKRNSDKLIARKKDWDPKKYGGFDSPTVAYSVLVVAKVEKGKSKKLKSVKELLGITIMERSSFEKNPIDFLEAKGYKEVKKDLIIKLPKYSLFELENGRKRMLASAGELQKGNELALPSKYVNFLYLASHYEKLKGSPEDNEQKQLFVEQHKHYLDEIIEQISEFSKRVILADANLDKVLSAYNKHRDKPIREQAENIIHLFTLTNLGAPAAFKYFDTTIDRKRYTSTKEVLDATLIHQSITGLYETRIDLSQLGGDSGGSSGGSSGSETPGTSESATPESSGGSSGGSSKPTWLHKFEVKENRWVYIPDAETHHLGQKIHTYIKHKWKSPLYMFHLREGGHVAAANYHIKKKYFSLIDISNFFGATSQSRVTRELGRLIPYVKAREIARLSTVKNLNGNGLKHVIPYGYPQSPILASLCFHQSFCGSTINTVSKSGHVSVSIFMDDILLSSDDLGQLENAFDIILEAIRRSGYTVNENKTQPPSLMVNVFNLELSQNSLRVTSKRIVEFLQAFISSKNPHERKGIASYVGSINTAQAKLFRSGGSKRTADGSEFEPKKKRKV

SEQ ID NO: 984 - protein, 1696 aa, synthetic construct
  REGION 1..1696: note = Description of Artificial Sequence: Synthetic polypeptide
MKRTADGSEFESPKKKRKVDKKYSIGLDIGTNSVGWAVITDEYKVPSKKFKVLGNTDRHSIKKNLIGALLFDSGETAEATRLKRTARRRYTRRKNRICYLQEIFSNEMAKVDDSFFHRLEESFLVEEDKKHERHPIFGNIVDEVAYHEKYPTIYHLRKKLVDSTDKADLRLIYLALAHMIKFRGHFLIEGDLNPDNSDVDKLFIQLVQTYNQLFEENPINASGVDAKAILSARLSKSRRLENLIAQLPGEKKNGLFGNLIALSLGLTPNFKSNFDLAEDAKLQLSKDTYDDDLDNLLAQIGDQYADLFLAAKNLSDAILLSDILRVNTEITKAPLSASMIKRYDEHHQDLTLLKALVRQQLPEKYKEIFFDQSKNGYAGYIDGGASQEEFYKFIKPILEKMDGTEELLVKLNREDLLRKQRTFDNGSIPHQIHLGELHAILRRQEDFYPFLKDNREKIEKILTFRIPYYVGPLARGNSRFAWMTRKSEETITPWNFEEVVDKGASAQSFIERMTNFDKNLPNEKVLPKHSLLYEYFTVYNELTKVKYVTEGMRKPAFLSGEQKKAIVDLLFKTNRKVTVKQLKEDYFKKIECFDSVEISGVEDRFNASLGTYHDLLKIIKDKDFLDNEENEDILEDIVLTLTLFEDREMIEERLKTYAHLFDDKVMKQLKRRRYTGWGRLSRKLINGIRDKQSGKTILDFLKSDGFANRNFMQLIHDDSLTFKEDIQKAQVSGQGDSLHEHIANLAGSPAIKKGILQTVKVVDELVKVMGRHKPENIVIEMARENQTTQKGQKNSRERMKRIEEGIKELGSQILKEHPVENTQLQNEKLYLYYLQNGRDMYVDQELDINRLSDYDVDAIVPQSFLKDDSIDNKVLTRSDKNRGKSDNVPSEEVVKKMKNYWRQLLNAKLITQRKFDNLTKAERGGLSELDKAGFIKRQLVETRQITKHVAQILDSRMNTKYDENDKLIREVKVITLKSKLVSDFRKDFQFYKVREINNYHHAHDAYLNAVVGTALIKKYPKLESEFVYGDYKVYDVRKMIAKSEQEIGKATAKYFFYSNIMNFFKTEITLANGEIRKRPLIETNGETGEIVWDKGRDFATVRKVLSMPQVNIVKKTEVQTGGFSKESILPKRNSDKLIARKKDWDPKKYGGFDSPTVAYSVLVVAKVEKGKSKKLKSVKELLGITIMERSSFEKNPIDFLEAKGYKEVKKDLIIKLPKYSLFELENGRKRMLASAGELQKGNELALPSKYVNFLYLASHYEKLKGSPEDNEQKQLFVEQHKHYLDEIIEQISEFSKRVILADANLDKVLSAYNKHRDKPIREQAENIIHLFTLTNLGAPAAFKYFDTTIDRKRYTSTKEVLDATLIHQSITGLYETRIDLSQLGGDSGGSSGGSSGSETPGTSESATPESSGGSSGGSSTIEVQRWEDKFEIKPGVWVYVPSVEARKVGGKILQDVRNKWIPPLYFYHLRTGGHLKAARLHLKSDFFAVVDIKQFFQSTSRSRITRDLKSYFTYSQAREISTFSTVRNLSHSPHKHVLPFGFVQSPILATLCLDKSYFGSLLRRLNKHHDLKLSVFMDDVIISSNDLAQLQAAYDEALVAMRKSGYQANMSKTQAPSSKISVFNLTLSKGVMKVTSQKMSDFLIDFYSSNYEPHRIGVKNYVEAVNPGQAKLFKLSGGSKRTADGSEFEPKKKRKV

SEQ ID NO: 985 - protein, 1694 aa, synthetic construct
  REGION 1..1694: note = Description of Artificial Sequence: Synthetic polypeptide
MKRTADGSEFESPKKKRKVDKKYSIGLDIGTNSVGWAVITDEYKVPSKKFKVLGNTDRHSIKKNLIGALLFDSGETAEATRLKRTARRRYTRRKNRICYLQEIFSNEMAKVDDSFFHRLEESFLVEEDKKHERHPIFGNIVDEVAYHEKYPTIYHLRKKLVDSTDKADLRLIYLALAHMIKFRGHFLIEGDLNPDNSDVDKLFIQLVQTYNQLFEENPINASGVDAKAILSARLSKSRRLENLIAQLPGEKKNGLFGNLIALSLGLTPNFKSNFDLAEDAKLQLSKDTYDDDLDNLLAQIGDQYADLFLAAKNLSDAILLSDILRVNTEITKAPLSASMIKRYDEHHQDLTLLKALVRQQLPEKYKEIFFDQSKNGYAGYIDGGASQEEFYKFIKPILEKMDGTEELLVKLNREDLLRKQRTFDNGSIPHQIHLGELHAILRRQEDFYPFLKDNREKIEKILTFRIPYYVGPLARGNSRFAWMTRKSEETITPWNFEEVVDKGASAQSFIERMTNFDKNLPNEKVLPKHSLLYEYFTVYNELTKVKYVTEGMRKPAFLSGEQKKAIVDLLFKTNRKVTVKQLKEDYFKKIECFDSVEISGVEDRFNASLGTYHDLLKIIKDKDFLDNEENEDILEDIVLTLTLFEDREMIEERLKTYAHLFDDKVMKQLKRRRYTGWGRLSRKLINGIRDKQSGKTILDFLKSDGFANRNFMQLIHDDSLTFKEDIQKAQVSGQGDSLHEHIANLAGSPAIKKGILQTVKVVDELVKVMGRHKPENIVIEMARENQTTQKGQKNSRERMKRIEEGIKELGSQILKEHPVENTQLQNEKLYLYYLQNGRDMYVDQELDINRLSDYDVDAIVPQSFLKDDSIDNKVLTRSDKNRGKSDNVPSEEVVKKMKNYWRQLLNAKLITQRKFDNLTKAERGGLSELDKAGFIKRQLVETRQITKHVAQILDSRMNTKYDENDKLIREVKVITLKSKLVSDFRKDFQFYKVREINNYHHAHDAYLNAVVGTALIKKYPKLESEFVYGDYKVYDVRKMIAKSEQEIGKATAKYFFYSNIMNFFKTEITLANGEIRKRPLIETNGETGEIVWDKGRDFATVRKVLSMPQVNIVKKTEVQTGGFSKESILPKRNSDKLIARKKDWDPKKYGGFDSPTVAYSVLVVAKVEKGKSKKLKSVKELLGITIMERSSFEKNPIDFLEAKGYKEVKKDLIIKLPKYSLFELENGRKRMLASAGELQKGNELALPSKYVNFLYLASHYEKLKGSPEDNEQKQLFVEQHKHYLDEIIEQISEFSKRVILADANLDKVLSAYNKHRDKPIREQAENIIHLFTLTNLGAPAAFKYFDTTIDRKRYTSTKEVLDATLIHQSITGLYETRIDLSQLGGDSGGSSGGSSGSETPGTSESATPESSGGSSGGSSSTPSDWLHKFEIKAERWVFVPSKETLKRGQKIHAYIKQKWKYPRYMFHLRNGGHVAAANFHLKSNYFSLIDVSDFYGTTSQSRVTRELGRLVPYVKAREIARLSTVVNPNRNGFKHVIPYGYPQSPILASLCFHHSFCGGVISSISKSERVFVSVYMDDILLSSDDMNLLVEAFDTVRQALRKSGYTLNENKTQPPSPKIQVFNLELGHNHLRVTPKRIVEFLKVFTSSSNEHERKGIASYVGSINKSQAKLFRSGGSKRTADGSEFEPKKKRKV

SEQ ID NO: 986 - protein, 1691 aa, synthetic construct
  REGION 1..1691: note = Description of Artificial Sequence: Synthetic polypeptide
MKRTADGSEFESPKKKRKVDKKYSIGLDIGTNSVGWAVITDEYKVPSKKFKVLGNTDRHSIKKNLIGALLFDSGETAEATRLKRTARRRYTRRKNRICYLQEIFSNEMAKVDDSFFHRLEESFLVEEDKKHERHPIFGNIVDEVAYHEKYPTIYHLRKKLVDSTDKADLRLIYLALAHMIKFRGHFLIEGDLNPDNSDVDKLFIQLVQTYNQLFEENPINASGVDAKAILSARLSKSRRLENLIAQLPGEKKNGLFGNLIALSLGLTPNFKSNFDLAEDAKLQLSKDTYDDDLDNLLAQIGDQYADLFLAAKNLSDAILLSDILRVNTEITKAPLSASMIKRYDEHHQDLTLLKALVRQQLPEKYKEIFFDQSKNGYAGYIDGGASQEEFYKFIKPILEKMDGTEELLVKLNREDLLRKQRTFDNGSIPHQIHLGELHAILRRQEDFYPFLKDNREKIEKILTFRIPYYVGPLARGNSRFAWMTRKSEETITPWNFEEVVDKGASAQSFIERMTNFDKNLPNEKVLPKHSLLYEYFTVYNELTKVKYVTEGMRKPAFLSGEQKKAIVDLLFKTNRKVTVKQLKEDYFKKIECFDSVEISGVEDRFNASLGTYHDLLKIIKDKDFLDNEENEDILEDIVLTLTLFEDREMIEERLKTYAHLFDDKVMKQLKRRRYTGWGRLSRKLINGIRDKQSGKTILDFLKSDGFANRNFMQLIHDDSLTFKEDIQKAQVSGQGDSLHEHIANLAGSPAIKKGILQTVKVVDELVKVMGRHKPENIVIEMARENQTTQKGQKNSRERMKRIEEGIKELGSQILKEHPVENTQLQNEKLYLYYLQNGRDMYVDQELDINRLSDYDVDAIVPQSFLKDDSIDNKVLTRSDKNRGKSDNVPSEEVVKKMKNYWRQLLNAKLITQRKFDNLTKAERGGLSELDKAGFIKRQLVETRQITKHVAQILDSRMNTKYDENDKLIREVKVITLKSKLVSDFRKDFQFYKVREINNYHHAHDAYLNAVVGTALIKKYPKLESEFVYGDYKVYDVRKMIAKSEQEIGKATAKYFFYSNIMNFFKTEITLANGEIRKRPLIETNGETGEIVWDKGRDFATVRKVLSMPQVNIVKKTEVQTGGFSKESILPKRNSDKLIARKKDWDPKKYGGFDSPTVAYSVLVVAKVEKGKSKKLKSVKELLGITIMERSSFEKNPIDFLEAKGYKEVKKDLIIKLPKYSLFELENGRKRMLASAGELQKGNELALPSKYVNFLYLASHYEKLKGSPEDNEQKQLFVEQHKHYLDEIIEQISEFSKRVILADANLDKVLSAYNKHRDKPIREQAENIIHLFTLTNLGAPAAFKYFDTTIDRKRYTSTKEVLDATLIHQSITGLYETRIDLSQLGGDSGGSSGGSSGSETPGTSESATPESSGGSSGGSSVKWEHRFELKKDKWVYVPTKEMRLYGTEIHNHLRAKWIPPLYFYHLRDGGHVACAKKHLHNRYFALIDIKNFFESTGQSRLTRELKTYLTYNNARQVAKLSTVRNPLPERPKYIIPYGYPQSPILSTFCLHKSFCGNLFKQLHVNPDIDISIYMDDIILSANDLSSCESAYRLLSEGLERSGYQMNTLKSQFPSEKIHVFNLELKHNSLRVLPFRLIEFLIAYTKSKNRHERKGIASYVGSVNTDQAKLFKSGGSKRTADGSEFEPKKKRKV

SEQ ID NO: 987 - protein, 1689 aa, synthetic construct
  REGION 1..1689: note = Description of Artificial Sequence: Synthetic polypeptide
MKRTADGSEFESPKKKRKVDKKYSIGLDIGTNSVGWAVITDEYKVPSKKFKVLGNTDRHSIKKNLIGALLFDSGETAEATRLKRTARRRYTRRKNRICYLQEIFSNEMAKVDDSFFHRLEESFLVEEDKKHERHPIFGNIVDEVAYHEKYPTIYHLRKKLVDSTDKADLRLIYLALAHMIKFRGHFLIEGDLNPDNSDVDKLFIQLVQTYNQLFEENPINASGVDAKAILSARLSKSRRLENLIAQLPGEKKNGLFGNLIALSLGLTPNFKSNFDLAEDAKLQLSKDTYDDDLDNLLAQIGDQYADLFLAAKNLSDAILLSDILRVNTEITKAPLSASMIKRYDEHHQDLTLLKALVRQQLPEKYKEIFFDQSKNGYAGYIDGGASQEEFYKFIKPILEKMDGTEELLVKLNREDLLRKQRTFDNGSIPHQIHLGELHAILRRQEDFYPFLKDNREKIEKILTFRIPYYVGPLARGNSRFAWMTRKSEETITPWNFEEVVDKGASAQSFIERMTNFDKNLPNEKVLPKHSLLYEYFTVYNELTKVKYVTEGMRKPAFLSGEQKKAIVDLLFKTNRKVTVKQLKEDYFKKIECFDSVEISGVEDRFNASLGTYHDLLKIIKDKDFLDNEENEDILEDIVLTLTLFEDREMIEERLKTYAHLFDDKVMKQLKRRRYTGWGRLSRKLINGIRDKQSGKTILDFLKSDGFANRNFMQLIHDDSLTFKEDIQKAQVSGQGDSLHEHIANLAGSPAIKKGILQTVKVVDELVKVMGRHKPENIVIEMARENQTTQKGQKNSRERMKRIEEGIKELGSQILKEHPVENTQLQNEKLYLYYLQNGRDMYVDQELDINRLSDYDVDAIVPQSFLKDDSIDNKVLTRSDKNRGKSDNVPSEEVVKKMKNYWRQLLNAKLITQRKFDNLTKAERGGLSELDKAGFIKRQLVETRQITKHVAQILDSRMNTKYDENDKLIREVKVITLKSKLVSDFRKDFQFYKVREINNYHHAHDAYLNAVVGTALIKKYPKLESEFVYGDYKVYDVRKMIAKSEQEIGKATAKYFFYSNIMNFFKTEITLANGEIRKRPLIETNGETGEIVWDKGRDFATVRKVLSMPQVNIVKKTEVQTGGFSKESILPKRNSDKLIARKKDWDPKKYGGFDSPTVAYSVLVVAKVEKGKSKKLKSVKELLGITIMERSSFEKNPIDFLEAKGYKEVKKDLIIKLPKYSLFELENGRKRMLASAGELQKGNELALPSKYVNFLYLASHYEKLKGSPEDNEQKQLFVEQHKHYLDEIIEQISEFSKRVILADANLDKVLSAYNKHRDKPIREQAENIIHLFTLTNLGAPAAFKYFDTTIDRKRYTSTKEVLDATLIHQSITGLYETRIDLSQLGGDSGGSSGGSSGSETPGTSESATPESSGGSSGGSSKWLSRFRLKSNTWVYVPTFETVKEGKLFKKAIEFKWIPPTNYYHLRSGGHVEAVKYHLGGKFFVHADISKFFNSINRSRITRELKPYFGYERSRAIAMESTVSIPVDSGQIFALPFGFVQSTIIASLCLRKSSLGKTIDVLNKTDGIRVSVYVDDIVVSTQCLEKAKAAFLMIQKSAERSGFLLNKEKSQGPSDKITAFNIDLRQNFMEVTSWRFSELLSSYKDATSDKKKSGIWGYVNSVNSAQASMLSGGSKRTADGSEFEPKKKRKV

SEQ ID NO: 988 - DNA, 128 bp, synthetic construct
  misc_feature 1..128: note = Description of Artificial Sequence: Synthetic polynucleotide
  source 1..128: mol_type = other DNA
ggggcccagactgagcacgtggttttagtactctggaaacagaatctactgaaacaagacaatatgtcgtgtttatcccatcaatttattggtgggactttcctctgcaatcacgtgctcagtctggg

SEQ ID NO: 989 - DNA, 98 bp, synthetic construct
  misc_feature 1..98: note = Description of Artificial Sequence: Synthetic oligonucleotide
  source 1..98: mol_type = other DNA
gctgcacatactagcccctgtcgttttagtactctggaaacagaatctactgaaacaagacaatatgtcgtgtttatcccatcaatttattggtggga

SEQ ID NO: 990 - protein, 337 aa, Staphylococcus aureus
EKIENEIVNKTYLAINSLEELRNMIGIKSDYFYKCLYVNDHFYNVIKIPKRKKDEYRELMIPNMALKNIQRWILDNVLYRRQVHKCATGFVPRKSIVNNAIPHVGQKYILKMDIENFFPSITFKQVRKIFSEMGYKFELATALANLCTVNNQLPQGAPTSPYIANIIFYNIDKRIFSYCQKNNLRYTRYADDITISGSNKVSFSKEIIREIVNQYNFRINESKTIMFKPGDRKKVTGIIVNEKISVPKTLIREVRKQIYFVNKFGLEEHLIRNNYSLDYEQQFIMSIYGKISFIKMIDFKKGVSLQKKFNEVLGNIESSNMYRDNIDFDDIELHWIN

SEQ ID NO: 991 - protein, 256 aa, Salmonella enterica
TIEVQRWEDKFEIKPGVWVYVPSVEARKVGGKILQAVRNKWIPPLYFYHLRTGGHLKAARLHLKSDFFAVVDIKQFFQSTSRSRITRDLKSYFTYSQAREISTFSTVRNLSHSPHKHVLPFGFVQSPILATLCLDKSYFGSLLRRLNKHHDLKLSVFMDDVIISSNNLAQLQAAYDEALVAMRKSGYQANMSKTQAPSSKISVFNLTLSKGVMKVTSQKMSDFLIDFYSSNYEPHRIGVKNYVEAVNPGQAKLFKL

SEQ ID NO: 992 - protein, 369 aa, Bacteroides fragilis
ELLLGIVIVVTCWMVVRIIRSSKNQEGYKRWRAGNYASENPYAKEKASGPLSQGLFSKRVRTTGARRFDDGAIRWCANLLATEESRLREVLDYIPRQYTCFHVRKRSGGFRYISAPAGDFRSMQQTIYHRILLLANIHPAVTGFCPGKSVSDNARVHLGRKNVLKVDLHDFFPSIRSPRVRAAFREMGYSRPIAKVLAELCCLRCCLPQGAPTSPALSNIIAYPMDKKMMALAGEYGLVYTRYADDLTFSGDYLPKDEVLVRIHRIIREEGFTMNVKKTRFLSEHKRKIITGVSVSSGKKMTLPKVKKREIRKNVHYVLTKGLVGHQEHIGSTDPVYLKRLLGSLCYWRSIEPDNRYVSDSITALKRLM

SEQ ID NO: 993 - protein, 382 aa, Burkholderia phytofirmans
AGMPGFVSAWRSEQPPRVVRVLTRPPFQRPPPPWLHDVALPQLPTLGDLAAWLDIEPGDLGWFADRWRVPTRGAATPLHHYAYKAIEKRDGRCRIIEIPKPRLRALQRKVLSGLLDRIPAHESVHGFRHGRNIVTFAAPHVGKAVVMRFDLTDFFASVHAGRVYSAFYALGYPQAVARALTALCTNRIPSGRLLAPDVRERIDWRERQRYRNRHLPQGAPTSPALANLCAFRLDLRLAGLARSVGATYTRYADDLAFSGDEELARMADRLCIRVAAIALEEGFGVNLRKTRVMRRSARQHLAGVVVNSHANVARPEFDALKAVLTNCVRHGWRSQNRDDLADFRAHLAGRVAHVAMVNAVRGARLRAVFERIEWEEEKPLDA

SEQ ID NO: 994 - protein, 348 aa, Fusobacterium nucleatum
EWIEYREQFITTAKKASKNSGYIKKNLKYAEKLYNQKLPIIYNASHFSKLVGYSLQYLYAASNDSSKFYREFEIKKKNGGSRKISEPLPSLKEIQKWILENILNKIQKEKVSKYAKAYQKKISIKENVKFHRGQKKVLSLDITNFFLNIKIDKIYEVFYNLGYSKSLSTLFSNLCTLNYSLPQGAPTSPILSNIVMLNFDNEIEKIVLEKRIRYTRYADDMTFSGDFLEKEIIKYVKENLNKIGLKINNKKTRVRKNWQQQMVTGIIVNEKIQISRKKRDELRQTMYYIEKYGIDSFLKYKGIKNKVYYLSHLKGILEYAYFINKNDKKLFNYIEYLKNNFFKEKSSI

SEQ ID NO: 995 - protein, 380 aa, Idiomarina baltica
NRWSSRAFKKHNSDKPAAVVETAALYGRKIQTSCPELPVIFTLNHLALKSGVPYNNLRSFVDRTIERPYRSFTLRKNGLGSNPRKFRVIKVPQQDLKKAQQFINQNILSKMEPHECSVAFSPGSKIYDAASEHCNARWLLKFDIVSFFESITEKSVYRVFRRYNYPALLSFEMARICTALKARPPINWGGAPPNIRYRTIPGYSNKNLGTLPQGAPTSPMLANLVSYNLDRRLKLIADAYNCHYSRYADDITFSTDSSLSRGEVSRIIAMINSTLREYGHTMNKAKTTIAPPGARKFYLGMNIHGDSPQLRKSFKRKLKQHLFFCEKNSVGPEKHSKHLGFVSVIGFKNHLRGLINYANQVDTVFGENCMKRFQSIDWPL

SEQ ID NO: 996 - protein, 469 aa, Thermoanaerobacter ethanolicus
DSKDMQRLQTTQQRGYPLDREMEFQKTTEVHSISSASRDGRNEVQRYTSKMLEMIVERGNMRAAYKRVVANKGSHGVDGMEVDELLPYLKENWPTIKQQLLEGKYKPQPVRRVEIPKPDGGVRLLGIPTALDRLIQQAIAQILNRVYNHTFSDSSYGFRPGRSAKDAIKAAEAYINEGYTWVVDMDLEKFFDRVNHDIIMSKLEKRIGDKRVLKLIRRYLESGVMINGVKVSTEEGTPQGGPLSPLLANIMLDELDKELEKRGHKFCRYADDCNIYVKSRSAGNRVMKSIKKFIESKLKLKVNEAKSAVDRPWRRKFLGFSFYTKENEVRIRIHEKSIKRFKEKVREITNRNKGISMENRIKRLNQITTGWVNYFGLADAKSIMKTLDEWIRRRLRACIWKQWKKIKTKHDNLVKLGVEEQKAWEYANTRKGYWRISNSPILNKTLTNKYFESIGYKSLSQRYLIVHNS

SEQ ID NO: 997 - protein, 419 aa, Bacillus thuringiensis
QETKPFGISKNVVMMAFERVKANKGTYGMDEQSIEMYEMDLKNNLYKLWNRMSSGSYFPKPVKAVAIPKKNGGTRTLGIPTVEDRVAQMVAKLYFEPNVERLFYEDSYGYRPNKSAIQAIEATRKRCWRKDWVLEFDIKGLFDNIRHDYLIEMVKRHTNQEWVTLYVQRWLITPFQMEDGTLIERTAGTPQGGVISPVLANLFLHYTFDDFMVKEFSSIPWARYADDGIAHCTSLKQAKYLQRRLEERFKLFGLELNLEKTKIAYCKDDDRQLSYPNTSFDFLGYTFRPRHAKNKHGKFFTNFSPAIADKAKKAIRKEVRSWRLQLKADKTLQDISNMFNKKIQGWINYYGHFYKSEMYSVLRYINSSLIKWVRRKYKKRKHRRKAEYWLGTIAQRERKLFAHWKYGILPATNNGSRMS

SEQ ID NO: 998 - protein, 433 aa, Mustela putorius
VPPALWGSRHNQRRFLRNVKKFISLGKHAKLSPQELTWKMKVQDCAWLRGSPGACSVPAAEHRRREGVLARLLCWLMGTYVVELLRSFFYVTETTFQKNRLFFYRKSVWSPLQTLGVRQHCTSVRLRELSAAEVRRQHEARATLLTSRLRFLPKPGGLRPIVNMDYVAGARALCRDKKIQHLTSQVKTLFSVLNYERARRPRLLGASVLGMDDIHRAWHDFVLRVRAQDPAPRLYFVKVDVTGAYDALPQDRLAEVVANVLRPHENTYCLRRYAVVRRTAQGHVRRSFKRHVSTFTDLPPYMRQFVERLQETTSLRDSVVIEQSYSLNEASSGLFQLFLSLVYSHVIRIGGNLLLRLVDDFLLITPHLKRAQAFLRTLVRGVPEYGCSANLQKTAVNFPVEDMALGSTAPLQLPAHCLFPWCGLLLDTQTLEV

SEQ ID NO: 999 - protein, 251 aa, Ewingella americana
DKWIHKFEIKEGRWVYVPSEKTREIGGKIHFYIKHKWNYPLYMYHLRKGGHVAAANRHIKKQYFSLIDISDFFGSTSQSRVTRELGKLIPYAKAREIAKLSTVRSPPSNGLKHVIPYGYPQSPILATLCFHQSFCGKLINIISKSGQISVSIYMDDILLSSDDLSQLEIAFNSVKAALAKSGYCINERKTQSPSTMVKVFNLELSQQSLRVSPKRIVEFLQAYISSKNAAERKGIASYVGSVNKSQSTIFK

SEQ ID NO: 1000 - protein, 249 aa, Stenotrophomonas maltophilia
KRWEHRFQVKSGRWVFVPTPASRAVGEQIRARVAKAWSPPAFYYHLRKGGHVAALRAHADSTYFFRCDLKNFFGSINLSRVTRCLKRYFSYVEARGMASASVVIAPGATKTMLPYGFVQSPLLASLALDQSRAGAYLRKLSAQEGITVSVYMDDIVVSSLEIGLLDKIKAELGEKAEKAGISLNQEKTEGPSTLVTVFNVELSHNSLVISEERMAEFREALMIASCDAVAMGILGYVASVNDAQLSKLY

SEQ ID NO: 1001 - protein, 255 aa, Yersinia enterocolitica
SNMAPRWINKFEIKPNVWVYEPSEACREEGAEILRFINRKWKIPTYYYHLRRGGHVEALRVHIENDWFVSLDIKEFFQSTSRSRVTRTLRNFLPYEKARIIAKVSTVSNFTNDKFSHFIPFGYVQSPLLATICLHYSSFGQLIKELSRCEDVKLSVYMDDIILSSSSLELLERTKTLLEESASRSHYKLNTLKVQGPAERITAFNIDLSHQSMVISPKRLLSFLVDFNSPDSDNLKREGIRSYIYSVNSEQAEYF

SEQ ID NO: 1002 - protein, 255 aa, Salmonella virchow
TLELQRWKHKFEIKPGVWVFAPSPEAVKNGSKILNAVRKHWNPPLYFFHLRTGGHLKATRLHLKNTYFAVVDIKQFFLSTSRSRVTRCLNEYFSYEKAREISRYSTVKNPSSGLHKYVLPFGFVQSPILATLCLDKSYLGSLLRKLSRKGTMKLSIYMDDVIISSNDFQTLQTTYQEILQAMEKSGYKLNLKKSQPPSNKIVVFNISLRHGNMSVTAERLSEFLIDFYASNDEQHKLGIANYVRSVNLEQAKLFR

SEQ ID NO: 1003 - protein, 252 aa, Enterobacter cloacae
KPTWLHKFEVKENRWVYIPDAETHHLGQKIHTYIKHKWKSPLYMFHLREGGHVAAANYHIKKKYFSLIDISNFFGATSQSRVTRELGRLIPYVKAREIARLSTVKNLNGNGLKHVIPYGYPQSPILASLCFHQSFCGSTINTVSKSGHVSVSIFMDDILLSSDDLGQLENAFDIILEAIRRSGYTVNENKTQPPSLMVNVFNLELSQNSLRVTSKRIVEFLQAFISSKNPHERKGIASYVGSINTAQAKLFR

SEQ ID NO: 1004 - protein, 256 aa, Klebsiella pneumoniae
TIEVQRWEDKFEIKPGVWVYVPSVEARKVGGKILQDVRNKWIPPLYFYHLRTGGHLKAARLHLKSDFFAVVDIKQFFQSTSRSRITRDLKSYFTYSQAREISTFSTVRNLSHSPHKHVLPFGFVQSPILATLCLDKSYFGSLLRRLNKHHDLKLSVFMDDVIISSNDLAQLQAAYDEALVAMRKSGYQANMSKTQAPSSKISVFNLTLSKGVMKVTSQKMSDFLIDFYSSNYEPHRIGVKNYVEAVNPGQAKLFKL

SEQ ID NO: 1005 - protein, 254 aa, Serratia plymuthica
STPSDWLHKFEIKAERWVFVPSKETLKRGQKIHAYIKQKWKYPRYMFHLRNGGHVAAANFHLKSNYFSLIDVSDFYGTTSQSRVTRELGRLVPYVKAREIARLSTVVNPNRNGFKHVIPYGYPQSPILASLCFHHSFCGGVISSISKSERVFVSVYMDDILLSSDDMNLLVEAFDTVRQALRKSGYTLNENKTQPPSPKIQVFNLELGHNHLRVTPKRIVEFLKVFTSSSNEHERKGIASYVGSINKSQAKLFR

SEQ ID NO: 1006 - protein, 251 aa, Enterobacter cloacae
VKWEHRFELKKDKWVYVPTKEMRLYGTEIHNHLRAKWIPPLYFYHLRDGGHVACAKKHLHNRYFALIDIKNFFESTGQSRLTRELKTYLTYNNARQVAKLSTVRNPLPERPKYIIPYGYPQSPILSTFCLHKSFCGNLFKQLHVNPDIDISIYMDDIILSANDLSSCESAYRLLSEGLERSGYQMNTLKSQFPSEKIHVFNLELKHNSLRVLPFRLIEFLIAYTKSKNRHERKGIASYVGSVNTDQAKLFK

SEQ ID NO: 1007 - protein, 1908 aa, synthetic construct
  REGION 1..1908: note = Description of Artificial Sequence: Synthetic polypeptide
MKRTADGSEFESPKKKRKVDKKYSIGLDIGTNSVGWAVITDEYKVPSKKFKVLGNTDRHSIKKNLIGALLFDSGETAEATRLKRTARRRYTRRKNRICYLQEIFSNEMAKVDDSFFHRLEESFLVEEDKKHERHPIFGNIVDEVAYHEKYPTIYHLRKKLVDSTDKADLRLIYLALAHMIKFRGHFLIEGDLNPDNSDVDKLFIQLVQTYNQLFEENPINASGVDAKAILSARLSKSRRLENLIAQLPGEKKNGLFGNLIALSLGLTPNFKSNFDLAEDAKLQLSKDTYDDDLDNLLAQIGDQYADLFLAAKNLSDAILLSDILRVNTEITKAPLSASMIKRYDEHHQDLTLLKALVRQQLPEKYKEIFFDQSKNGYAGYIDGGASQEEFYKFIKPILEKMDGTEELLVKLNREDLLRKQRTFDNGSIPHQIHLGELHAILRRQEDFYPFLKDNREKIEKILTFRIPYYVGPLARGNSRFAWMTRKSEETITPWNFEEVVDKGASAQSFIERMTNFDKNLPNEKVLPKHSLLYEYFTVYNELTKVKYVTEGMRKPAFLSGEQKKAIVDLLFKTNRKVTVKQLKEDYFKKIECFDSVEISGVEDRFNASLGTYHDLLKIIKDKDFLDNEENEDILEDIVLTLTLFEDREMIEERLKTYAHLFDDKVMKQLKRRRYTGWGRLSRKLINGIRDKQSGKTILDFLKSDGFANRNFMQLIHDDSLTFKEDIQKAQVSGQGDSLHEHIANLAGSPAIKKGILQTVKVVDELVKVMGRHKPENIVIEMARENQTTQKGQKNSRERMKRIEEGIKELGSQILKEHPVENTQLQNEKLYLYYLQNGRDMYVDQELDINRLSDYDVDAIVPQSFLKDDSIDNKVLTRSDKNRGKSDNVPSEEVVKKMKNYWRQLLNAKLITQRKFDNLTKAERGGLSELDKAGFIKRQLVETRQITKHVAQILDSRMNTKYDENDKLIREVKVITLKSKLVSDFRKDFQFYKVREINNYHHAHDAYLNAVVGTALIKKYPKLESEFVYGDYKVYDVRKMIAKSEQEIGKATAKYFFYSNIMNFFKTEITLANGEIRKRPLIETNGETGEIVWDKGRDFATVRKVLSMPQVNIVKKTEVQTGGFSKESILPKRNSDKLIARKKDWDPKKYGGFDSPTVAYSVLVVAKVEKGKSKKLKSVKELLGITIMERSSFEKNPIDFLEAKGYKEVKKDLIIKLPKYSLFELENGRKRMLASAGELQKGNELALPSKYVNFLYLASHYEKLKGSPEDNEQKQLFVEQHKHYLDEIIEQISEFSKRVILADANLDKVLSAYNKHRDKPIREQAENIIHLFTLTNLGAPAAFKYFDTTIDRKRYTSTKEVLDATLIHQSITGLYETRIDLSQLGGDSGGSSGGSSGSETPGTSESATPESSGGSSGGSSLTQEDIEEINPEVWAEEGKSGLLDIPPIKIEMQKETPPIRVKQYPISPEGRKGLAPIIEQLLKEGILEPCMSPHNTPILAVKKAEGKYRLVQDLREINKRTVTRHPVVPNPYTLLSQIPREHAWFTIIDLKDAFWACPLAEECRDWFAFEWEHPETKRKQQLRWTRLPQGFTESPNLFGQALEKLLEQFSPEEGVQILQYVDDLLISGEDQSEVRETSIQLLNFLGEKGLKVSKSKLQFVESEVTYLGHLIGKGYKRLSPERIAGILSIPPPKTKRDIRKLLGLFGYCRLWLDKYTQSVKFLYDKLVDSEPIEWTEEDEKQLKDLKEKLSSAPVLSLPDLKKEFDLFVNTEEGVAYGVLTQEWGGCKKPVAFLSKLLDPVARGWPTCLQAVAAAAILIEETQKLTLQGKIRVHTPHDLKTILSQKAQKWLTDSRILRYEIALMNTDNLEFTTSPIQRDRTLTFKRNKKSGGSKRTADGSEFEPKKKRKV

SEQ ID NO: 1008 - protein, 1918 aa, synthetic construct
  REGION 1..1918: note = Description of Artificial Sequence: Synthetic polypeptide
MKRTADGSEFESPKKKRKVDKKYSIGLDIGTNSVGWAVITDEYKVPSKKFKVLGNTDRHSIKKNLIGALLFDSGETAEATRLKRTARRRYTRRKNRICYLQEIFSNEMAKVDDSFFHRLEESFLVEEDKKHERHPIFGNIVDEVAYHEKYPTIYHLRKKLVDSTDKADLRLIYLALAHMIKFRGHFLIEGDLNPDNSDVDKLFIQLVQTYNQLFEENPINASGVDAKAILSARLSKSRRLENLIAQLPGEKKNGLFGNLIALSLGLTPNFKSNFDLAEDAKLQLSKDTYDDDLDNLLAQIGDQYADLFLAAKNLSDAILLSDILRVNTEITKAPLSASMIKRYDEHHQDLTLLKALVRQQLPEKYKEIFFDQSKNGYAGYIDGGASQEEFYKFIKPILEKMDGTEELLVKLNREDLLRKQRTFDNGSIPHQIHLGELHAILRRQEDFYPFLKDNREKIEKILTFRIPYYVGPLARGNSRFAWMTRKSEETITPWNFEEVVDKGASAQSFIERMTNFDKNLPNEKVLPKHSLLYEYFTVYNELTKVKYVTEGMRKPAFLSGEQKKAIVDLLFKTNRKVTVKQLKEDYFKKIECFDSVEISGVEDRFNASLGTYHDLLKIIKDKDFLDNEENEDILEDIVLTLTLFEDREMIEERLKTYAHLFDDKVMKQLKRRRYTGWGRLSRKLINGIRDKQSGKTILDFLKSDGFANRNFMQLIHDDSLTFKEDIQKAQVSGQGDSLHEHIANLAGSPAIKKGILQTVKVVDELVKVMGRHKPENIVIEMARENQTTQKGQKNSRERMKRIEEGIKELGSQILKEHPVENTQLQNEKLYLYYLQNGRDMYVDQELDINRLSDYDVDAIVPQSFLKDDSIDNKVLTRSDKNRGKSDNVPSEEVVKKMKNYWRQLLNAKLITQRKFDNLTKAERGGLSELDKAGFIKRQLVETRQITKHVAQILDSRMNTKYDENDKLIREVKVITLKSKLVSDFRKDFQFYKVREINNYHHAHDAYLNAVVGTALIKKYPKLESEFVYGDYKVYDVRKMIAKSEQEIGKATAKYFFYSNIMNFFKTEITLANGEIRKRPLIETNGETGEIVWDKGRDFATVRKVLSMPQVNIVKKTEVQTGGFSKESILPKRNSDKLIARKKDWDPKKYGGFDSPTVAYSVLVVAKVEKGKSKKLKSVKELLGITIMERSSFEKNPIDFLEAKGYKEVKKDLIIKLPKYSLFELENGRKRMLASAGELQKGNELALPSKYVNFLYLASHYEKLKGSPEDNEQKQLFVEQHKHYLDEIIEQISEFSKRVILADANLDKVLSAYNKHRDKPIREQAENIIHLFTLTNLGAPAAFKYFDTTIDRKRYTSTKEVLDATLIHQSITGLYETRIDLSQLGGDSGGSSGGSSGSETPGTSESATPESSGGSSGGSSSKEPKQDVTLPQTWLSDFPQAWAETAGMGLAVQQPPIVIQLKATATPVRIKQYPMSREARRGIKPHIQRLLDLGILVPCQSPWNTPLLPVKKPGTNDYRPVQDLREVNKRVEDIHPTVPNPYNLLSSLPPERQWYTVLDLKDAFFCLPLHPESQPLFAFEWRDPETGRSGQLTWTRLPQGFKNSPTIFDEALHRDLADFRIQHPDLTLLQYVDDLLLAADTEQDCLKGTQALLQTLGELGYRASAKKAQLCQREVTYLGYKLKGGQRWLTEARKETVLQIPTPKTPRQVREFLGTAGFCRLWIPGFAELAAPLYPLTKEGNAFNWGEKEEKAFQELKQALLQAPALGLPDLTKPFQLFVDEKQGIAKGVLTQKLGPWKRPVAYLSKKLDPVAAGWPPCLRMIAATALLTKDAGKLTLGQEIVILTPHAVEAVLKQPPDRWLSNARMIHYQALLLDTPRVQFDPSVALNPATTETLPESSGGSKRTADGSEFEPKKKRKV

SEQ ID NO: 1009 - protein, 1918 aa, synthetic construct
  REGION 1..1918: note = Description of Artificial Sequence: Synthetic polypeptide
MKRTADGSEFESPKKKRKVDKKYSIGLDIGTNSVGWAVITDEYKVPSKKFKVLGNTDRHSIKKNLIGALLFDSGETAEATRLKRTARRRYTRRKNRICYLQEIFSNEMAKVDDSFFHRLEESFLVEEDKKHERHPIFGNIVDEVAYHEKYPTIYHLRKKLVDSTDKADLRLIYLALAHMIKFRGHFLIEGDLNPDNSDVDKLFIQLVQTYNQLFEENPINASGVDAKAILSARLSKSRRLENLIAQLPGEKKNGLFGNLIALSLGLTPNFKSNFDLAEDAKLQLSKDTYDDDLDNLLAQIGDQYADLFLAAKNLSDAILLSDILRVNTEITKAPLSASMIKRYDEHHQDLTLLKALVRQQLPEKYKEIFFDQSKNGYAGYIDGGASQEEFYKFIKPILEKMDGTEELLVKLNREDLLRKQRTFDNGSIPHQIHLGELHAILRRQEDFYPFLKDNREKIEKILTFRIPYYVGPLARGNSRFAWMTRKSEETITPWNFEEVVDKGASAQSFIERMTNFDKNLPNEKVLPKHSLLYEYFTVYNELTKVKYVTEGMRKPAFLSGEQKKAIVDLLFKTNRKVTVKQLKEDYFKKIECFDSVEISGVEDRFNASLGTYHDLLKIIKDKDFLDNEENEDILEDIVLTLTLFEDREMIEERLKTYAHLFDDKVMKQLKRRRYTGWGRLSRKLINGIRDKQSGKTILDFLKSDGFANRNFMQLIHDDSLTFKEDIQKAQVSGQGDSLHEHIANLAGSPAIKKGILQTVKVVDELVKVMGRHKPENIVIEMARENQTTQKGQKNSRERMKRIEEGIKELGSQILKEHPVENTQLQNEKLYLYYLQNGRDMYVDQELDINRLSDYDVDAIVPQSFLKDDSIDNKVLTRSDKNRGKSDNVPSEEVVKKMKNYWRQLLNAKLITQRKFDNLTKAERGGLSELDKAGFIKRQLVETRQITKHVAQILDSRMNTKYDENDKLIREVKVITLKSKLVSDFRKDFQFYKVREINNYHHAHDAYLNAVVGTALIKKYPKLESEFVYGDYKVYDVRKMIAKSEQEIGKATAKYFFYSNIMNFFKTEITLANGEIRKRPLIETNGETGEIVWDKGRDFATVRKVLSMPQVNIVKKTEVQTGGFSKESILPKRNSDKLIARKKDWDPKKYGGFDSPTVAYSVLVVAKVEKGKSKKLKSVKELLGITIMERSSFEKNPIDFLEAKGYKEVKKDLIIKLPKYSLFELENGRKRMLASAGELQKGNELALPSKYVNFLYLASHYEKLKGSPEDNEQKQLFVEQHKHYLDEIIEQISEFSKRVILADANLDKVLSAYNKHRDKPIREQAENIIHLFTLTNLGAPAAFKYFDTTIDRKRYTSTKEVLDATLIHQSITGLYETRIDLSQLGGDSGGSSGGSSGSETPGTSESATPESSGGSSGGSSQKEPTQDVTLPQTWLTDFPQAWAETAGMGLAVQQAPLVIELKATATPVSIKQYPMSREARRGIKPHIQRLLDQGILVPCQSPWNTPLLPVKKPGTNDYRPVQDLREVNKRVEDIHPTVPNPYNLLSGLPPERQWYTVLDLKDAFFCLRLHPTSQPLFAFEWRDPETGMSGQLTWTRLPQGFKNSPTIFDEALHRDLADFRIQHPDVTLLQYVDDLLLAADTEQDCLKGTQALLQTLGELGYRASAKKAQICQREVTYLGYKLKGGQRWLTEARKETVLQIPTPKTARQVREFLGTAGFCRLWIPGFAELAAPLYPLTKEGSAFNWGEKEEKAFQELKQALLTAPALGLPDLTKPFQLFVDEKQGIAKGVLTQKLGPWRRPVAYLSKKLDPVAAGWPPCLRMVAATALLTKDAGKLTMGQEIVILTPHAVEAVLKQPPDRWLSNARMIHYQALLLDTPRVQFHPTVALNPATTEPLPESSGGSKRTADGSEFEPKKKRKV

SEQ ID NO: 1010 - protein, 2087 aa, synthetic construct
  REGION 1..2087: note = Description of Artificial Sequence: Synthetic polypeptide
MKRTADGSEFESPKKKRKVDKKYSIGLDIGTNSVGWAVITDEYKVPSKKFKVLGNTDRHSIKKNLIGALLFDSGETAEATRLKRTARRRYTRRKNRICYLQEIFSNEMAKVDDSFFHRLEESFLVEEDKKHERHPIFGNIVDEVAYHEKYPTIYHLRKKLVDSTDKADLRLIYLALAHMIKFRGHFLIEGDLNPDNSDVDKLFIQLVQTYNQLFEENPINASGVDAKAILSARLSKSRRLENLIAQLPGEKKNGLFGNLIALSLGLTPNFKSNFDLAEDAKLQLSKDTYDDDLDNLLAQIGDQYADLFLAAKNLSDAILLSDILRVNTEITKAPLSASMIKRYDEHHQDLTLLKALVRQQLPEKYKEIFFDQSKNGYAGYIDGGASQEEFYKFIKPILEKMDGTEELLVKLNREDLLRKQRTFDNGSIPHQIHLGELHAILRRQEDFYPFLKDNREKIEKILTFRIPYYVGPLARGNSRFAWMTRKSEETITPWNFEEVVDKGASAQSFIERMTNFDKNLPNEKVLPKHSLLYEYFTVYNELTKVKYVTEGMRKPAFLSGEQKKAIVDLLFKTNRKVTVKQLKEDYFKKIECFDSVEISGVEDRFNASLGTYHDLLKIIKDKDFLDNEENEDILEDIVLTLTLFEDREMIEERLKTYAHLFDDKVMKQLKRRRYTGWGRLSRKLINGIRDKQSGKTILDFLKSDGFANRNFMQLIHDDSLTFKEDIQKAQVSGQGDSLHEHIANLAGSPAIKKGILQTVKVVDELVKVMGRHKPENIVIEMARENQTTQKGQKNSRERMKRIEEGIKELGSQILKEHPVENTQLQNEKLYLYYLQNGRDMYVDQELDINRLSDYDVDAIVPQSFLKDDSIDNKVLTRSDKNRGKSDNVPSEEVVKKMKNYWRQLLNAKLITQRKFDNLTKAERGGLSELDKAGFIKRQLVETRQITKHVAQILDSRMNTKYDENDKLIREVKVITLKSKLVSDFRKDFQFYKVREINNYHHAHDAYLNAVVGTALIKKYPKLESEFVYGDYKVYDVRKMIAKSEQEIGKATAKYFFYSNIMNFFKTEITLANGEIRKRPLIETNGETGEIVWDKGRDFATVRKVLSMPQVNIVKKTEVQTGGFSKESILPKRNSDKLIARKKDWDPKKYGGFDSPTVAYSVLVVAKVEKGKSKKLKSVKELLGITIMERSSFEKNPIDFLEAKGYKEVKKDLIIKLPKYSLFELENGRKRMLASAGELQKGNELALPSKYVNFLYLASHYEKLKGSPEDNEQKQLFVEQHKHYLDEIIEQISEFSKRVILADANLDKVLSAYNKHRDKPIREQAENIIHLFTLTNLGAPAAFKYFDTTIDRKRYTSTKEVLDATLIHQSITGLYETRIDLSQLGGDSGGSSGGSSGSETPGTSESATPESSGGSSGGSSLPKQVEDAVVPWVWSTEGPGKAVAVEPVVIELKPGEQPVRIKQYPMKREARKGIKPIIERFLKLGILEECQSPYNTPILPVKKPNGEYRLVQDLRAVNKITVTIYPVVPNPYTLLSSLSPEHQWFTVIDLKDAFFCIPLEPESQKIFAFEWEDPETGRKTQLTWTRLPQGFKNSPTIFGEALAKDLQEWKAPPESGTLLQYVDDLLIATETKETCIKATIALLNFLGEKGYRVSKKKAQLVQQEVTYLGYEISKGQRRLSPDRKEAICQIPKPKTVRELRSFLGMVGWCRLWIPNYGLLAKPLYELLKEGSDPLNWTEEEEKAFQQLKQALTTAPALGLPDLSKPFQLFVNEKQGIALGVLTQKLGPWKRPVAYLSKQLDPVAAGWPSCLRAVAATAILIQEARKLTLGQKMVVYVPHTVSAVLEQKAGHWLSSSRLLKYQAILLDQPDVELKVTKVINPATFLYSEPEPVHHDCLETIEASYSSRPDLKDTPLEDAEEWFTDGSSYVINGKRKSGYAIITCKEVIESGPLNPSYSAQKAELIALTRALELAKGRTGNIYTDSKYAFGVVHAHGAIWKELADREAKKAAKTDLQQPLKALFLPKRLSIIHCPGHQKGHSAEARGNRMADQAARKAAITETPDTSTLLSGGSKRTADGSEFEPKKKRKV

SEQ ID NO: 1011 - protein, 1367 aa, synthetic construct
  REGION 1..1367: note = Description of Artificial Sequence: Synthetic polypeptide
DKKYSIGLDIGTNSVGWAVITDEYKVPSKKFKVLGNTDRHSIKKNLIGALLFDSGETAEATRLKRTARRRYTRRKNRICYLQEIFSNEMAKVDDSFFHRLEESFLVEEDKKHERHPIFGNIVDEVAYHEKYPTIYHLRKKLVDSTDKADLRLIYLALAHMIKFRGHFLIEGDLNPDNSDVDKLFIQLVQTYNQLFEENPINASGVDAKAILSARLSKSRRLENLIAQLPGEKKNGLFGNLIALSLGLTPNFKSNFDLAEDAKLQLSKDTYDDDLDNLLAQIGDQYADLFLAAKNLSDAILLSDILRVNTEITKAPLSASMIKRYDEHHQDLTLLKALVRQQLPEKYKEIFFDQSKNGYAGYIDGGASQEEFYKFIKPILEKMDGTEELLVKLNREDLLRKQRTFDNGSIPHQIHLGELHAILRRQEDFYPFLKDNREKIEKILTFRIPYYVGPLARGNSRFAWMTRKSEETITPWNFEEVVDKGASAQSFIERMTNFDKNLPNEKVLPKHSLLYEYFTVYNELTKVKYVTEGMRKPAFLSGEQKKAIVDLLFKTNRKVTVKQLKEDYFKKIECFDSVEISGVEDRFNASLGTYHDLLKIIKDKDFLDNEENEDILEDIVLTLTLFEDREMIEERLKTYAHLFDDKVMKQLKRRRYTGWGRLSRKLINGIRDKQSGKTILDFLKSDGFANRNFMQLIHDDSLTFKEDIQKAQVSGQGDSLHEHIANLAGSPAIKKGILQTVKVVDELVKVMGRHKPENIVIEMARENQTTQKGQKNSRERMKRIEEGIKELGSQILKEHPVENTQLQNEKLYLYYLQNGRDMYVDQELDINRLSDYDVDAIVPQSFLKDDSIDNKVLTRSDKNRGKSDNVPSEEVVKKMKNYWRQLLNAKLITQRKFDNLTKAERGGLSELDKAGFIKRQLVETRQITKHVAQILDSRMNTKYDENDKLIREVKVITLKSKLVSDFRKDFQFYKVREINNYHHAHDAYLNAVVGTALIKKYPKLESEFVYGDYKVYDVRKMIAKSEQEIGKATAKYFFYSNIMNFFKTEITLANGEIRKRPLIETNGETGEIVWDKGRDFATVRKVLSMPQVNIVKKTEVQTGGFSKESILPKRNSDKLIARKKDWDPKKYGGFDSPTVAYSVLVVAKVEKGKSKKLKSVKELLGITIMERSSFEKNPIDFLEAKGYKEVKKDLIIKLPKYSLFELENGRKRMLASAGELQKGNELALPSKYVNFLYLASHYEKLKGSPEDNEQKQLFVEQHKHYLDEIIEQISEFSKRVILADANLDKVLSAYNKHRDKPIREQAENIIHLFTLTNLGAPAAFKYFDTTIDRKRYTSTKEVLDATLIHQSITGLYETRIDLSQLGGD

SEQ ID NO: 1012 - protein, 2131 aa, synthetic construct
  REGION 1..2131: note = Description of Artificial Sequence: Synthetic polypeptide
MKRTADGSEFESPKKKRKVDKKYSIGLDIGTNSVGWAVITDEYKVPSKKFKVLGNTDRHSIKKNLIGALLFDSGETAEATRLKRTARRRYTRRKNRICYLQEIFSNEMAKVDDSFFHRLEESFLVEEDKKHERHPIFGNIVDEVAYHEKYPTIYHLRKKLVDSTDKADLRLIYLALAHMIKFRGHFLIEGDLNPDNSDVDKLFIQLVQTYNQLFEENPINASGVDAKAILSARLSKSRKLENLIAQLPGEKKNGLFGNLIALSLGLTPNFKSNFDLAEDAKLQLSKDTYDDDLDNLLAQIGDQYADLFLAAKNLSDAILLSDILRVNTEITKAPLSASMIKRYDEHHQDLTLLKALVRQQLPEKYKEIFFDQSKNGYAGYIDGGASQEEFYKFIKPILEKMDGTEELLVKLKREDLLRKQRTFDNGSIPHQIHLGELHAILRRQEDFYPFLKDNREKIEKILTFRIPYYVGPLARGNSRFAWMTRKSEETITPWNFEEVVDKGASAQSFIERMTNFDKNLPNEKVLPKHSLLYEYFTVYNELTKVKYVTEGMRKPAFLSGEQKKAIVDLLFKTNRKVTVKQLKEDYFKKIECFDSVEISGVEDRFNASLGTYHDLLKIIKDKDFLDNEENEDILEDIVLTLTLFEDREMIEERLKTYAHLFDDKVMKQLKRRRYTGWGRLSRKLINGIRDKQSGKTILDFLKSDGFANRNFMQLIHDDSLTFKEDIQKAQVSGQGDSLHEHIANLAGSPAIKKGILQTVKVVDELVKVMGRHKPENIVIEMARENQTTQKGQKNSRERMKRIEEGIKELGSQILKEHPVENTQLQNEKLYLYYLQNGRDMYVDQELDINRLSDYDVDAIVPQSFLKDDSIDNKVLTRSDKNRGKSDNVPSEEVVKKMKNYWRQLLNAKLITQRKFDNLTKAERGGLSELDKAGFIKRQLVETRQITKHVAQILDSRMNTKYDENDKLIREVKVITLKSKLVSDFRKDFQFYKVREINNYHHAHDAYLNAVVGTALIKKYPKLESEFVYGDYKVYDVRKMIAKSEQEIGKATAKYFFYSNIMNFFKTEITLANGEIRKRPLIETNGETGEIVWDKGRDFATVRKVLSMPQVNIVKKTEVQTGGFSKESILPKRNSDKLIARKKDWDPKKYGGFDSPTVAYSVLVVAKVEKGKSKKLKSVKELLGITIMERSSFEKNPIDFLEAKGYKEVKKDLIIKLPKYSLFELENGRKRMLASAGELQKGNELALPSKYVNFLYLASHYEKLKGSPEDNEQKQLFVEQHKHYLDEIIEQISEFSKRVILADANLDKVLSAYNKHRDKPIREQAENIIHLFTLTNLGAPAAFKYFDTTIDRKRYTSTKEVLDATLIHQSITGLYETRIDLSQLGGDSGGSSGGSKRTADGSEFESPKKKRKVSGGSSGGSTLNIEDEYRLHETSKEPDVSLGSTWLSDFPQAWAETGGMGLAVRQAPLIIPLKATSTPVSIKQYPMSQEARLGIKPHIQRLLDQGILVPCQSPWNTPLLPVKKPGTNDYRPVQDLREVNKRVEDIHPTVPNPYNLLSGLPPSHQWYTVLDLKDAFFCLRLHPTSQPLFAFEWRDPEMGISGQLTWTRLPQGFKNSPTLFNEALHRDLADFRIQHPDLILLQYVDDLLLAATSELDCQQGTRALLQTLGNLGYRASAKKAQICQKQVKYLGYLLKEGQRWLTEARKETVMGQPTPKTPRQLREFLGKAGFCRLFIPGFAEMAAPLYPLTKPGTLFNWGPDQQKAYQEIKQALLTAPALGLPDLTKPFELFVDEKQGYAKGVLTQKLGPWRRPVAYLSKKLDPVAAGWPPCLRMVAAIAVLTKDAGKLTMGQPLVILAPHAVEALVKQPPDRWLSNARMTHYQALLLDTDRVQFGPVVALNPATLLPLPEEGLQHNCLDILAEAHGTRPDLTDQPLPDADHTWYTDGSSLLQEGQRKAGAAVTTETEVIWAKALPAGTSAQRAELIALTQALKMAEGKKLNVYTDSRYAFATAHIHGEIYRRRGWLTSEGKEIKNKDEILALLKALFLPKRLSIIHCPGHQKGHSAEARGNRMADQAARKAAITETPDTSTLLIENSSPSGGSKRTADGSEFESPKKKRKVGSGPAAKRVKLD

SEQ ID NO: 1013 - protein, 1367 aa, synthetic construct
  REGION 1..1367: note = Description of Artificial Sequence: Synthetic polypeptide
DKKYSIGLDIGTNSVGWAVITDEYKVPSKKFKVLGNTDRHSIKKNLIGALLFDSGETAEATRLKRTARRRYTRRKNRICYLQEIFSNEMAKVDDSFFHRLEESFLVEEDKKHERHPIFGNIVDEVAYHEKYPTIYHLRKKLVDSTDKADLRLIYLALAHMIKFRGHFLIEGDLNPDNSDVDKLFIQLVQTYNQLFEENPINASGVDAKAILSARLSKSRKLENLIAQLPGEKKNGLFGNLIALSLGLTPNFKSNFDLAEDAKLQLSKDTYDDDLDNLLAQIGDQYADLFLAAKNLSDAILLSDILRVNTEITKAPLSASMIKRYDEHHQDLTLLKALVRQQLPEKYKEIFFDQSKNGYAGYIDGGASQEEFYKFIKPILEKMDGTEELLVKLKREDLLRKQRTFDNGSIPHQIHLGELHAILRRQEDFYPFLKDNREKIEKILTFRIPYYVGPLARGNSRFAWMTRKSEETITPWNFEEVVDKGASAQSFIERMTNFDKNLPNEKVLPKHSLLYEYFTVYNELTKVKYVTEGMRKPAFLSGEQKKAIVDLLFKTNRKVTVKQLKEDYFKKIECFDSVEISGVEDRFNASLGTYHDLLKIIKDKDFLDNEENEDILEDIVLTLTLFEDREMIEERLKTYAHLFDDKVMKQLKRRRYTGWGRLSRKLINGIRDKQSGKTILDFLKSDGFANRNFMQLIHDDSLTFKEDIQKAQVSGQGDSLHEHIANLAGSPAIKKGILQTVKVVDELVKVMGRHKPENIVIEMARENQTTQKGQKNSRERMKRIEEGIKELGSQILKEHPVENTQLQNEKLYLYYLQNGRDMYVDQELDINRLSDYDVDAIVPQSFLKDDSIDNKVLTRSDKNRGKSDNVPSEEVVKKMKNYWRQLLNAKLITQRKFDNLTKAERGGLSELDKAGFIKRQLVETRQITKHVAQILDSRMNTKYDENDKLIREVKVITLKSKLVSDFRKDFQFYKVREINNYHHAHDAYLNAVVGTALIKKYPKLESEFVYGDYKVYDVRKMIAKSEQEIGKATAKYFFYSNIMNFFKTEITLANGEIRKRPLIETNGETGEIVWDKGRDFATVRKVLSMPQVNIVKKTEVQTGGFSKESILPKRNSDKLIARKKDWDPKKYGGFDSPTVAYSVLVVAKVEKGKSKKLKSVKELLGITIMERSSFEKNPIDFLEAKGYKEVKKDLIIKLPKYSLFELENGRKRMLASAGELQKGNELALPSKYVNFLYLASHYEKLKGSPEDNEQKQLFVEQHKHYLDEIIEQISEFSKRVILADANLDKVLSAYNKHRDKPIREQAENIIHLFTLTNLGAPAAFKYFDTTIDRKRYTSTKEVLDATLIHQSITGLYETRIDLSQLGGD

SEQ ID NO: 1014 - protein, 34 aa, synthetic construct
  REGION 1..34: note = Description of Artificial Sequence: Synthetic polypeptide
SGGSSGGSKRTADGSEFESPKKKRKVSGGSSGGS

SEQ ID NO: 1015 - protein, 22 aa, synthetic construct
  REGION 1..22: note = Description of Artificial Sequence: Synthetic peptide
SGGSKRTADGSEFESPKKKRKV

SEQ ID NO: 1016 - protein, 12 aa, synthetic construct
  REGION 1..12: note = Description of Artificial Sequence: Synthetic peptide
GSGPAAKRVKLD

SEQ ID NO: 1017 - DNA, 119 bp, synthetic construct
  misc_feature 1..119: note = Description of Artificial Sequence: Synthetic polynucleotide
  source 1..119: mol_type = other DNA
ggcccagactgagcacgtgagttttagagctagaaatagcaagttaaaataaggctagtccgttatcaacttgaaaaagtggcaccgagtcggtgctctgcgatcacgtgctcagtctg

SEQ ID NO: 1018 - DNA, 125 bp, synthetic construct
  misc_feature 1..125: note = Description of Artificial Sequence: Synthetic polynucleotide
  source 1..125: mol_type = other DNA
gtcatcttagtcattacctggttttagagctagaaatagcaagttaaaataaggctagtccgttatcaacttgaaaaagtggcaccgagtcggtgcaacgaacacatcaggtaatgactaagatg

SEQ ID NO: 1019 - DNA, 131 bp, synthetic construct
  misc_feature 1..131: note = Description of Artificial Sequence: Synthetic polynucleotide
  source 1..131: mol_type = other DNA
gatgtctgcaggccagatgagttttagagctagaaatagcaagttaaaataaggctagtccgttatcaacttgaaaaagtggcaccgagtcggtgcaatgtgccatctggagcactcatctggcctgcaga

SEQ ID NO: 1020 - DNA, 123 bp, synthetic construct
  misc_feature 1..123: note = Description of Artificial Sequence: Synthetic polynucleotide
  source 1..123: mol_type = other DNA
gagtccgagcagaagaagaagttttagagctagaaatagcaagttaaaataaggctagtccgttatcaacttgaaaaagtggcaccgagtcggtgatgggagcacttcttcttctgctcggac

SEQ ID NO: 1021 - DNA, 125 bp, synthetic construct
  misc_feature 1..125: note = Description of Artificial Sequence: Synthetic polynucleotide
  source 1..125: mol_type = other DNA
ggaatcccttctgcagcaccgttttagagctagaaatagcaagttaaaataaggctagtccgttatcaacttgaaaaagtggcaccgagtcggtgggaaaagcgatcaaggtgctgcagaaggga

SEQ ID NO: 1022 - DNA, 119 bp, synthetic construct
  misc_feature 1..119: note = Description of Artificial Sequence: Synthetic polynucleotide
  source 1..119: mol_type = other DNA
gttgatgtctgcaggccagatggttttagtactctggaaacagaatctactgaaacaagacaatatgtcgtgtttatcccatcaatttattggtgggagagacctcatctggcctgcag

SEQ ID NO: 1023 - DNA, 121 bp, synthetic construct
  misc_feature 1..121: note = Description of Artificial Sequence: Synthetic polynucleotide
  source 1..121: mol_type = other DNA
gttgatgtctgcaggccagatggttttagtactctggaaacagaatctactgaaacaagacaatatgtcgtgtttatcccatcaatttattggtgggatggagacctcatctggcctgcag

SEQ ID NO: 1024 - DNA, 123 bp, synthetic construct
  misc_feature 1..123: note = Description of Artificial Sequence: Synthetic polynucleotide
  source 1..123: mol_type = other DNA
gttgatgtctgcaggccagatggttttagtactctggaaacagaatctactgaaacaagacaatatgtcgtgtttatcccatcaatttattggtgggatctggagacctcatctggcctgcag

SEQ ID NO: 1025 - DNA, 123 bp, synthetic construct
  misc_feature 1..123: note = Description of Artificial Sequence: Synthetic polynucleotide
  source 1..123: mol_type = other DNA
gttgatgtctgcaggccagatggttttagtactctggaaacagaatctactgaaacaagacaatatgtcgtgtttatcccatcaatttattggtgggatggagacctcatctggcctgcagac

SEQ ID NO: 1026 - DNA, 125 bp, synthetic construct
  misc_feature 1..125: note = Description of Artificial Sequence: Synthetic polynucleotide
  source 1..125: mol_type = other DNA
gttgatgtctgcaggccagatggttttagtactctggaaacagaatctactgaaacaagacaatatgtcgtgtttatcccatcaatttattggtgggatctggagacctcatctggcctgcagac

SEQ ID NO: 1027 - DNA, 123 bp, synthetic construct
  misc_feature 1..123: note = Description of Artificial Sequence: Synthetic polynucleotide
  source 1..123: mol_type = other DNA
gttgatgtctgcaggccagatggttttagtactctggaaacagaatctactgaaacaagacaatatgtcgtgtttatcccatcaatttattggtgggagagacctcatctggcctgcagacat

SEQ ID NO: 1028 - DNA, 125 bp, synthetic construct
  misc_feature 1..125: note = Description of Artificial Sequence: Synthetic polynucleotide
  source 1..125: mol_type = other DNA
gttgatgtctgcaggccagatggttttagtactctggaaacagaatctactgaaacaagacaatatgtcgtgtttatcccatcaatttattggtgggatggagacctcatctggcctgcagacat

SEQ ID NO: 1029 - DNA, 127 bp, synthetic construct
  misc_feature 1..127: note = Description of Artificial Sequence: Synthetic polynucleotide
  source 1..127: mol_type = other DNA
gttgatgtctgcaggccagatggttttagtactctggaaacagaatctactgaaacaagacaatatgtcgtgtttatcccatcaatttattggtgggatctggagacctcatctggcctgcagacat

SEQ ID NO: 1030 - DNA, 118 bp, synthetic construct
  misc_feature 1..118: note = Description of Artificial Sequence: Synthetic polynucleotide
  source 1..118: mol_type = other DNA
gcaaacagctacatatttgggagttttagtactctggaaacagaatctactgaaacaagacaatatgtcgtgtttatcccatcaatttattggtgggacaactcaagtcccaaatatg

SEQ ID NO: 1031 - DNA, 121 bp, synthetic construct
  misc_feature 1..121: note = Description of Artificial Sequence: Synthetic polynucleotide
  source 1..121: mol_type = other DNA
gcaaacagctacatatttgggagttttagtactctggaaacagaatctactgaaacaagacaatatgtcgtgtttatcccatcaatttattggtgggaaagcaactcaagtcccaaatatg

SEQ ID NO: 1032 - DNA, 124 bp, synthetic construct
  misc_feature 1..124: note = Description of Artificial Sequence: Synthetic polynucleotide
  source 1..124: mol_type = other DNA
gcaaacagctacatatttgggagttttagtactctggaaacagaatctactgaaacaagacaatatgtcgtgtttatcccatcaatttattggtgggaatgaagcaactcaagtcccaaatatg

SEQ ID NO: 1033 - DNA, 120 bp, synthetic construct
  misc_feature 1..120: note = Description of Artificial Sequence: Synthetic polynucleotide
  source 1..120: mol_type = other DNA
gcaaacagctacatatttgggagttttagtactctggaaacagaatctactgaaacaagacaatatgtcgtgtttatcccatcaatttattggtgggacaactcaagtcccaaatatgta

SEQ ID NO: 1034 - DNA, 123 bp, synthetic construct
  misc_feature 1..123: note = Description of Artificial Sequence: Synthetic polynucleotide
  source 1..123: mol_type = other DNA
gcaaacagctacatatttgggagttttagtactctggaaacagaatctactgaaacaagacaatatgtcgtgtttatcccatcaatttattggtgggaaagcaactcaagtcccaaatatgta

SEQ ID NO: 1035 - DNA, 126 bp, synthetic construct
  misc_feature 1..126: note = Description of Artificial Sequence: Synthetic polynucleotide
  source 1..126: mol_type = other DNA
gcaaacagctacatatttgggagttttagtactctggaaacagaatctactgaaacaagacaatatgtcgtgtttatcccatcaatttattggtgggaatgaagcaactcaagtcccaaatatgta

SEQ ID NO: 1036 - DNA, 122 bp, synthetic construct
  misc_feature 1..122: note = Description of Artificial Sequence: Synthetic polynucleotide
  source 1..122: mol_type = other DNA
gcaaacagctacatatttgggagttttagtactctggaaacagaatctactgaaacaagacaatatgtcgtgtttatcccatcaatttattggtgggacaactcaagtcccaaatatgtagc

SEQ ID NO: 1037 - DNA, 125 bp, synthetic construct
  misc_feature 1..125: note = Description of Artificial Sequence: Synthetic polynucleotide
  source 1..125: mol_type = other DNA
gcaaacagctacatatttgggagttttagtactctggaaacagaatctactgaaacaagacaatatgtcgtgtttatcccatcaatttattggtgggaaagcaactcaagtcccaaatatgtagc

SEQ ID NO: 1038 - DNA, 128 bp, synthetic construct
  misc_feature 1..128: note = Description of Artificial Sequence: Synthetic polynucleotide
  source 1..128: mol_type = other DNA
gcaaacagctacatatttgggagttttagtactctggaaacagaatctactgaaacaagacaatatgtcgtgtttatcccatcaatttattggtgggaatgaagcaactcaagtcccaaatatgtagc

SEQ ID NO: 1039 - DNA, 98 bp, synthetic construct
  misc_feature 1..98: note = Description of Artificial Sequence: Synthetic oligonucleotide
  source 1..98: mol_type = other DNA
gcatgtacagagagcccagggcgttttagtactctggaaacagaatctactgaaacaagacaatatgtcgtgtttatcccatcaatttattggtggga

SEQ ID NO: 1040 - DNA, 97 bp, synthetic construct
  misc_feature 1..97: note = Description of Artificial Sequence: Synthetic oligonucleotide
  source 1..97: mol_type = other DNA
gctccagatggcacattgtcagttttagtactctggaaacagaatctactgaaacaagacaatatgtcgtgtttatcccatcaatttattggtggga

SEQ ID NO: 1041 - DNA, 118 bp, synthetic construct
  misc_feature 1..118: note = Description of Artificial Sequence: Synthetic polynucleotide
  source 1..118: mol_type = other DNA
gctccctggcccaggtgaaggtgttttagtactctggaaacagaatctactgaaacaagacaatatgtcgtgtttatcccatcaatttattggtgggatggaagcacaccttcacctg

SEQ ID NO: 1042 - DNA, 120 bp, synthetic construct
  misc_feature 1..120: note = Description of Artificial Sequence: Synthetic polynucleotide
  source 1..120: mol_type = other DNA
gctccctggcccaggtgaaggtgttttagtactctggaaacagaatctactgaaacaagacaatatgtcgtgtttatcccatcaatttattggtgggatctggaagcacaccttcacctg

SEQ ID NO: 1043 - DNA, 122 bp, synthetic construct
  misc_feature 1..122: note = Description of Artificial Sequence: Synthetic polynucleotide
  source 1..122: mol_type = other DNA
gctccctggcccaggtgaaggtgttttagtactctggaaacagaatctactgaaacaagacaatatgtcgtgtttatcccatcaatttattggtgggagttctggaagcacaccttcacctg

SEQ ID NO: 1044 - DNA, 120 bp, synthetic construct
  misc_feature 1..120: note = Description of Artificial Sequence: Synthetic polynucleotide
  source 1..120: mol_type = other DNA
gctccctggcccaggtgaaggtgttttagtactctggaaacagaatctactgaaacaagacaatatgtcgtgtttatcccatcaatttattggtgggatggaagcacaccttcacctggg

SEQ ID NO: 1045 - DNA, 122 bp, synthetic construct
  misc_feature 1..122: note = Description of Artificial Sequence: Synthetic polynucleotide
  source 1..122: mol_type = other DNA
gctccctggcccaggtgaaggtgttttagtactctggaaacagaatctactgaaacaagacaatatgtcgtgtttatcccatcaatttattggtgggatctggaagcacaccttcacctggg

SEQ ID NO: 1046 - DNA, 124 bp, synthetic construct
  misc_feature 1..124: note = Description of Artificial Sequence: Synthetic polynucleotide
  source 1..124: mol_type = other DNA
gctccctggcccaggtgaaggtgttttagtactctggaaacagaatctactgaaacaagacaatatgtcgtgtttatcccatcaatttattggtgggagttctggaagcacaccttcacctggg

SEQ ID NO: 1047 - DNA, 122 bp, synthetic construct
  misc_feature 1..122: note = Description of Artificial Sequence: Synthetic polynucleotide
  source 1..122: mol_type = other DNA
gctccctggcccaggtgaaggtgttttagtactctggaaacagaatctactgaaacaagacaatatgtcgtgtttatcccatcaatttattggtgggatggaagcacaccttcacctgggcc

SEQ ID NO: 1048 - DNA, 124 bp, synthetic construct
  misc_feature 1..124: note = Description of Artificial Sequence: Synthetic polynucleotide
  source 1..124: mol_type = other DNA
gctccctggcccaggtgaaggtgttttagtactctggaaacagaatctactgaaacaagacaatatgtcgtgtttatcccatcaatttattggtgggatctggaagcacaccttcacctgggcc

SEQ ID NO: 1049 - DNA, 126 bp, synthetic construct
  misc_feature 1..126: note = Description of Artificial Sequence: Synthetic polynucleotide
  source 1..126: mol_type = other DNA
gctccctggcccaggtgaaggtgttttagtactctggaaacagaatctactgaaacaagacaatatgtcgtgtttatcccatcaatttattggtgggagttctggaagcacaccttcacctgggcc

SEQ ID NO: 1050 - DNA, 118 bp, synthetic construct
  misc_feature 1..118: note = Description of Artificial Sequence: Synthetic polynucleotide
  source 1..118: mol_type = other DNA
gctgcttcgtggcaatgcgccagttttagtactctggaaacagaatctactgaaacaagacaatatgtcgtgtttatcccatcaatttattggtgggaatcaacaggtggcgcattgc

SEQ ID NO: 1051 - DNA, 120 bp, synthetic construct
  misc_feature 1..120: note = Description of Artificial Sequence: Synthetic polynucleotide
  source 1..120: mol_type = other DNA
gctgcttcgtggcaatgcgccagttttagtactctggaaacagaatctactgaaacaagacaatatgtcgtgtttatcccatcaatttattggtgggaacatcaacaggtggcgcattgc

SEQ ID NO: 1052 - DNA, 123 bp, synthetic construct
  misc_feature 1..123: note = Description of Artificial Sequence: Synthetic polynucleotide
  source 1..123: mol_type = other DNA
gctgcttcgtggcaatgcgccagttttagtactctggaaacagaatctactgaaacaagacaatatgtcgtgtttatcccatcaatttattggtgggaatcacatcaacaggtggcgcattgc

SEQ ID NO: 1053 - DNA, 120 bp, synthetic construct
  misc_feature 1..120: note = Description of Artificial Sequence: Synthetic polynucleotide
  source 1..120: mol_type = other DNA
gctgcttcgtggcaatgcgccagttttagtactctggaaacagaatctactgaaacaagacaatatgtcgtgtttatcccatcaatttattggtgggaatcaacaggtggcgcattgcca

SEQ ID NO: 1054 - DNA, 122 bp, synthetic construct
  misc_feature 1..122: note = Description of Artificial Sequence: Synthetic polynucleotide
  source 1..122: mol_type = other DNA
gctgcttcgtggcaatgcgccagttttagtactctggaaacagaatctactgaaacaagacaatatgtcgtgtttatcccatcaatttattggtgggaacatcaacaggtggcgcattgcca

SEQ ID NO: 1055 - DNA, 125 bp, synthetic construct
  misc_feature 1..125: note = Description of Artificial Sequence: Synthetic polynucleotide
  source 1..125: mol_type = other DNA
gctgcttcgtggcaatgcgccagttttagtactctggaaacagaatctactgaaacaagacaatatgtcgtgtttatcccatcaatttattggtgggaatcacatcaacaggtggcgcattgcca

SEQ ID NO: 1056 - DNA, 122 bp, synthetic construct
  misc_feature 1..122: note = Description of Artificial Sequence: Synthetic polynucleotide
  source 1..122: mol_type = other DNA
gctgcttcgtggcaatgcgccagttttagtactctggaaacagaatctactgaaacaagacaatatgtcgtgtttatcccatcaatttattggtgggaatcaacaggtggcgcattgccacg

SEQ ID NO: 1057 - DNA, 124 bp, synthetic construct
  misc_feature 1..124: note = Description of Artificial Sequence: Synthetic polynucleotide
  source 1..124: mol_type = other DNA
gctgcttcgtggcaatgcgccagttttagtactctggaaacagaatctactgaaacaagacaatatgtcgtgtttatcccatcaatttattggtgggaacatcaacaggtggcgcattgccacg

SEQ ID NO: 1058 - DNA, 127 bp, synthetic construct
  misc_feature 1..127: note = Description of Artificial Sequence: Synthetic polynucleotide
  source 1..127: mol_type = other DNA
gctgcttcgtggcaatgcgccagttttagtactctggaaacagaatctactgaaacaagacaatatgtcgtgtttatcccatcaatttattggtgggaatcacatcaacaggtggcgcattgccacg

SEQ ID NO: 1059 - DNA, 98 bp, synthetic construct
  misc_feature 1..98: note = Description of Artificial Sequence: Synthetic oligonucleotide
  source 1..98: mol_type = other DNA
gtgggagcccttcttcttctgcgttttagtactctggaaacagaatctactgaaacaagacaatatgtcgtgtttatcccatcaatttattggtggga

SEQ ID NO: 1060 - DNA, 97 bp, synthetic construct
  misc_feature 1..97: note = Description of Artificial Sequence: Synthetic oligonucleotide
  source 1..97: mol_type = other DNA
gaaccggaggacaaagtacaagttttagtactctggaaacagaatctactgaaacaagacaatatgtcgtgtttatcccatcaatttattggtggga

SEQ ID NO: 1061 - DNA, 119 bp, synthetic construct
  misc_feature 1..119: note = Description of Artificial Sequence: Synthetic polynucleotide
  source 1..119: mol_type = other DNA
gcagtcatcttagtcattacctgttttagtactctggaaacagaatctactgaaacaagacaatatgtcgtgtttatcccatcaatttattggtgggaacacgtcaggtaatgactaag

SEQ ID NO: 1062 - DNA, 121 bp, synthetic construct
  misc_feature 1..121: note = Description of Artificial Sequence: Synthetic polynucleotide
  source 1..121: mol_type = other DNA
gcagtcatcttagtcattacctgttttagtactctggaaacagaatctactgaaacaagacaatatgtcgtgtttatcccatcaatttattggtgggagaacacgtcaggtaatgactaag

SEQ ID NO: 1063 - DNA, 123 bp, synthetic construct
  misc_feature 1..123: note = Description of Artificial Sequence: Synthetic polynucleotide
  source 1..123: mol_type = other DNA
gcagtcatcttagtcattacctgttttagtactctggaaacagaatctactgaaacaagacaatatgtcgtgtttatcccatcaatttattggtgggaacgaacacgtcaggtaatgactaag

SEQ ID NO: 1064 - DNA, 121 bp, synthetic construct
  misc_feature 1..121: note = Description of Artificial Sequence: Synthetic polynucleotide
  source 1..121: mol_type = other DNA
gcagtcatcttagtcattacctgttttagtactctggaaacagaatctactgaaacaagacaatatgtcgtgtttatcccatcaatttattggtgggaacacgtcaggtaatgactaagat

SEQ ID NO: 1065 - DNA, 123 bp, synthetic construct
  misc_feature 1..123: note = Description of Artificial Sequence: Synthetic polynucleotide
  source 1..123: mol_type = other DNA
gcagtcatcttagtcattacctgttttagtactctggaaacagaatctactgaaacaagacaatatgtcgtgtttatcccatcaatttattggtgggagaacacgtcaggtaatgactaagat

SEQ ID NO: 1066 - DNA, 125 bp, synthetic construct
  misc_feature 1..125: note = Description of Artificial Sequence: Synthetic polynucleotide
  source 1..125: mol_type = other DNA
gcagtcatcttagtcattacctgttttagtactctggaaacagaatctactgaaacaagacaatatgtcgtgtttatcccatcaatttattggtgggaacgaacacgtcaggtaatgactaagat

SEQ ID NO: 1067 - DNA, 122 bp, synthetic construct
  misc_feature 1..122: note = Description of Artificial Sequence: Synthetic polynucleotide
  source 1..122: mol_type = other DNA
gcagtcatcttagtcattacctgttttagtactctggaaacagaatctactgaaacaagacaatatgtcgtgtttatcccatcaatttattggtgggaacacgtcaggtaatgactaagatg

SEQ ID NO: 1068 - DNA, 124 bp, synthetic construct
  misc_feature 1..124: note = Description of Artificial Sequence: Synthetic polynucleotide
  source 1..124: mol_type = other DNA
gcagtcatcttagtcattacctgttttagtactctggaaacagaatctactgaaacaagacaatatgtcgtgtttatcccatcaatttattggtgggagaacacgtcaggtaatgactaagatg

SEQ ID NO: 1069 - DNA, 126 bp, synthetic construct
  misc_feature 1..126: note = Description of Artificial Sequence: Synthetic polynucleotide
  source 1..126: mol_type = other DNA
gcagtcatcttagtcattacctgttttagtactctggaaacagaatctactgaaacaagacaatatgtcgtgtttatcccatcaatttattggtgggaacgaacacgtcaggtaatgactaagatg

SEQ ID NO: 1070 - DNA, 118 bp, synthetic construct
  misc_feature 1..118: note = Description of Artificial Sequence: Synthetic polynucleotide
  source 1..118: mol_type = other DNA
gtgtctcaggctgtgcagacaagttttagtactctggaaacagaatctactgaaacaagacaatatgtcgtgtttatcccatcaatttattggtgggaagttgcgtttgtctgcacag

SEQ ID NO: 1071 - DNA, 120 bp, synthetic construct
  misc_feature 1..120: note = Description of Artificial Sequence: Synthetic polynucleotide
  source 1..120: mol_type = other DNA
gtgtctcaggctgtgcagacaagttttagtactctggaaacagaatctactgaaacaagacaatatgtcgtgtttatcccatcaatttattggtgggatgagttgcgtttgtctgcacag

SEQ ID NO: 1072 - DNA, 123 bp, synthetic construct
  misc_feature 1..123: note = Description of Artificial Sequence: Synthetic polynucleotide
  source 1..123: mol_type = other DNA
gtgtctcaggctgtgcagacaagttttagtactctggaaacagaatctactgaaacaagacaatatgtcgtgtttatcccatcaatttattggtgggaggttgagttgcgtttgtctgcacag

SEQ ID NO: 1073 - DNA, 120 bp, synthetic construct
  misc_feature 1..120: note = Description of Artificial Sequence: Synthetic polynucleotide
  source 1..120: mol_type = other DNA
gtgtctcaggctgtgcagacaagttttagtactctggaaacagaatctactgaaacaagacaatatgtcgtgtttatcccatcaatttattggtgggaagttgcgtttgtctgcacagcc

SEQ ID NO: 1074 - DNA, 122 bp, synthetic construct
  misc_feature 1..122: note = Description of Artificial Sequence: Synthetic polynucleotide
  source 1..122: mol_type = other DNA
gtgtctcaggctgtgcagacaagttttagtactctggaaacagaatctactgaaacaagacaatatgtcgtgtttatcccatcaatttattggtgggatgagttgcgtttgtctgcacagcc

SEQ ID NO: 1075 - DNA, 125 bp, synthetic construct
  misc_feature 1..125: note = Description of Artificial Sequence: Synthetic polynucleotide
  source 1..125: mol_type = other DNA
gtgtctcaggctgtgcagacaagttttagtactctggaaacagaatctactgaaacaagacaatatgtcgtgtttatcccatcaatttattggtgggaggttgagttgcgtttgtctgcacagcc

SEQ ID NO: 1076 - DNA, 121 bp, synthetic construct
  misc_feature 1..121: note = Description of Artificial Sequence: Synthetic polynucleotide
  source 1..121: mol_type = other DNA
gtgtctcaggctgtgcagacaagttttagtactctggaaacagaatctactgaaacaagacaatatgtcgtgtttatcccatcaatttattggtgggaagttgcgtttgtctgcacagcct

SEQ ID NO: 1077 - DNA, 123 bp, synthetic construct
  misc_feature 1..123: note = Description of Artificial Sequence: Synthetic polynucleotide
  source 1..123: mol_type = other DNA
gtgtctcaggctgtgcagacaagttttagtactctggaaacagaatctactgaaacaagacaatatgtcgtgtttatcccatcaatttattggtgggatgagttgcgtttgtctgcacagcct

SEQ ID NO: 1078 - DNA, 126 bp, synthetic construct
  misc_feature 1..126: note = Description of Artificial Sequence: Synthetic polynucleotide
  source 1..126: mol_type = other DNA
gtgtctcaggctgtgcagacaagttttagtactctggaaacagaatctactgaaacaagacaatatgtcgtgtttatcccatcaatttattggtgggaggttgagttgcgtttgtctgcacagcct

SEQ ID NO: 1079 - DNA, 116 bp, synthetic construct
  misc_feature 1..116: note = Description of Artificial Sequence: Synthetic polynucleotide
  source 1..116: mol_type = other DNA
gagcgatccaggtgctgcagagttttagtactctggaaacagaatctactgaaacaagacaatatgtcgtgtttatcccatcaatttattggtgggagaatcacttctgcagcacc

SEQ ID NO: 1080 - DNA, 119 bp, synthetic construct
  misc_feature 1..119: note = Description of Artificial Sequence: Synthetic polynucleotide
  source 1..119: mol_type = other DNA
gagcgatccaggtgctgcagagttttagtactctggaaacagaatctactgaaacaagacaatatgtcgtgtttatcccatcaatttattggtgggaatggaatcacttctgcagcacc

SEQ ID NO: 1081 - DNA, 122 bp, synthetic construct
  misc_feature 1..122: note = Description of Artificial Sequence: Synthetic polynucleotide
  source 1..122: mol_type = other DNA
gagcgatccaggtgctgcagagttttagtactctggaaacagaatctactgaaacaagacaatatgtcgtgtttatcccatcaatttattggtgggactcatggaatcacttctgcagcacc

SEQ ID NO: 1082 - DNA, 118 bp, synthetic construct
  misc_feature 1..118: note = Description of Artificial Sequence: Synthetic polynucleotide
  source 1..118: mol_type = other DNA
gagcgatccaggtgctgcagagttttagtactctggaaacagaatctactgaaacaagacaatatgtcgtgtttatcccatcaatttattggtgggagaatcacttctgcagcacctg

SEQ ID NO: 1083 - DNA, 121 bp, synthetic construct
  misc_feature 1..121: note = Description of Artificial Sequence: Synthetic polynucleotide
  source 1..121: mol_type = other DNA
gagcgatccaggtgctgcagagttttagtactctggaaacagaatctactgaaacaagacaatatgtcgtgtttatcccatcaatttattggtgggaatggaatcacttctgcagcacctg

SEQ ID NO: 1084 - DNA, 124 bp, synthetic construct
  misc_feature 1..124: note = Description of Artificial Sequence: Synthetic polynucleotide
  source 1..124: mol_type = other DNA
gagcgatccaggtgctgcagagttttagtactctggaaacagaatctactgaaacaagacaatatgtcgtgtttatcccatcaatttattggtgggactcatggaatcacttctgcagcacctg

SEQ ID NO: 1085 - DNA, 120 bp, synthetic construct
  misc_feature 1..120: note = Description of Artificial Sequence: Synthetic polynucleotide
  source 1..120: mol_type = other DNA
gagcgatccaggtgctgcagagttttagtactctggaaacagaatctactgaaacaagacaatatgtcgtgtttatcccatcaatttattggtgggagaatcacttctgcagcacctgga

SEQ ID NO: 1086 - DNA, 123 bp, synthetic construct
  misc_feature 1..123: note = Description of Artificial Sequence: Synthetic polynucleotide
  source 1..123: mol_type = other DNA
gagcgatccaggtgctgcagagttttagtactctggaaacagaatctactgaaacaagacaatatgtcgtgtttatcccatcaatttattggtgggaatggaatcacttctgcagcacctgga

SEQ ID NO: 1087 - DNA, 126 bp, synthetic construct
  misc_feature 1..126: note = Description of Artificial Sequence: Synthetic polynucleotide
  source 1..126: mol_type = other DNA
gagcgatccaggtgctgcagagttttagtactctggaaacagaatctactgaaacaagacaatatgtcgtgtttatcccatcaatttattggtgggactcatggaatcacttctgcagcacctgga

SEQ ID NO: 1088 - DNA, 98 bp, synthetic construct
  misc_feature 1..98: note = Description of Artificial Sequence: Synthetic oligonucleotide
  source 1..98: mol_type = other DNA
gacgcagagagtcgccgtctccgttttagtactctggaaacagaatctactgaaacaagacaatatgtcgtgtttatcccatcaatttattggtggga

SEQ ID NO: 1089 - DNA, 116 bp, synthetic construct
  misc_feature 1..116: note = Description of Artificial Sequence: Synthetic polynucleotide
  source 1..116: mol_type = other DNA
ggggcccagactgagcacgtggttttagtactctggaaacagaatctactgaaacaagacaatatgtcgtgtttatcccatcaatttattggtgggatctgcaatcacgtgctcag

SEQ ID NO: 1090 - DNA, 119 bp, synthetic construct
  misc_feature 1..119: note = Description of Artificial Sequence: Synthetic polynucleotide
  source 1..119: mol_type = other DNA
ggggcccagactgagcacgtggttttagtactctggaaacagaatctactgaaacaagacaatatgtcgtgtttatcccatcaatttattggtgggatcctctgcaatcacgtgctcag

SEQ ID NO: 1091 - DNA, 122 bp, synthetic construct
  misc_feature 1..122: note = Description of Artificial Sequence: Synthetic polynucleotide
  source 1..122: mol_type = other DNA
ggggcccagactgagcacgtggttttagtactctggaaacagaatctactgaaacaagacaatatgtcgtgtttatcccatcaatttattggtgggactttcctctgcaatcacgtgctcag

SEQ ID NO: 1092 - DNA, 118 bp, synthetic construct
  misc_feature 1..118: note = Description of Artificial Sequence: Synthetic polynucleotide
  source 1..118: mol_type = other DNA
ggggcccagactgagcacgtggttttagtactctggaaacagaatctactgaaacaagacaatatgtcgtgtttatcccatcaatttattggtgggatctgcaatcacgtgctcagtc

SEQ ID NO: 1093 - DNA, 121 bp, synthetic construct
  misc_feature 1..121: note = Description of Artificial Sequence: Synthetic polynucleotide
  source 1..121: mol_type = other DNA
ggggcccagactgagcacgtggttttagtactctggaaacagaatctactgaaacaagacaatatgtcgtgtttatcccatcaatttattggtgggatcctctgcaatcacgtgctcagtc

SEQ ID NO: 1094 - DNA, 124 bp, synthetic construct
  misc_feature 1..124: note = Description of Artificial Sequence: Synthetic polynucleotide
  source 1..124: mol_type = other DNA
ggggcccagactgagcacgtggttttagtactctggaaacagaatctactgaaacaagacaatatgtcgtgtttatcccatcaatttattggtgggactttcctctgcaatcacgtgctcagtc

SEQ ID NO: 1095 - DNA, 120 bp, synthetic construct
  misc_feature 1..120: note = Description of Artificial Sequence: Synthetic polynucleotide
  source 1..120: mol_type = other DNA
ggggcccagactgagcacgtggttttagtactctggaaacagaatctactgaaacaagacaatatgtcgtgtttatcccatcaatttattggtgggatctgcaatcacgtgctcagtctg

SEQ ID NO: 1096 - DNA, 123 bp, synthetic construct
  misc_feature 1..123: note = Description of Artificial Sequence: Synthetic polynucleotide
  source 1..123: mol_type = other DNA
ggggcccagactgagcacgtggttttagtactctggaaacagaatctactgaaacaagacaatatgtcgtgtttatcccatcaatttattggtgggatcctctgcaatcacgtgctcagtctg

SEQ ID NO: 1097 - DNA, 126 bp, synthetic construct
  misc_feature 1..126: note = Description of Artificial Sequence: Synthetic polynucleotide
  source 1..126: mol_type = other DNA
ggggcccagactgagcacgtggttttagtactctggaaacagaatctactgaaacaagacaatatgtcgtgtttatcccatcaatttattggtgggactttcctctgcaatcacgtgctcagtctg

SEQ ID NO: 1098 - DNA, 122 bp, synthetic construct
  misc_feature 1..122: note = Description of Artificial Sequence: Synthetic polynucleotide
  source 1..122: mol_type = other DNA
ggggcccagactgagcacgtggttttagtactctggaaacagaatctactgaaacaagacaatatgtcgtgtttatcccatcaatttattggtgggatctgcaatcacgtgctcagtctggg

SEQ ID NO: 1099 - DNA, 125 bp, synthetic construct
  misc_feature 1..125: note = Description of Artificial Sequence: Synthetic polynucleotide
  source 1..125: mol_type = other DNA
ggggcccagactgagcacgtggttttagtactctggaaacagaatctactgaaacaagacaatatgtcgtgtttatcccatcaatttattggtgggatcctctgcaatcacgtgctcagtctggg

SEQ ID NO: 1100 - protein, 1113 aa, unidentified
  REGION 1..1113: note = Description of Unknown: exemplary sequence of a Cas9 recognizing a NG PAM sequence
MDKKYSIGLDIGTNSVGWAVITDEYKVPSKKFKVLGNTDRHSIKKNLIGALLFDSGETAEATRLKRTARRRYTRRKNRICYLQEIFSNEMAKVDDSFFHRLEESFLVEEDKKHERHPIFGNIVDEVAYHEKYPTIYHLRKKLVDSTDKADLRLIYLALAHMIKFRGHFLIEGDLNPDNSDVDKLFIQLVQTYNQLFEENPINASGVDAKAILSARLSKSRRLENLIAQLPGEKKNGLFGNLIALSLGLTPNFKSNFDLAEDAKLQLSKDTYDDDLDNLLAQIGDQYADLFLAAKNLSDAILLSDILRVNTEITKAPLSASMIKRYDEHHQDLTLLKALVRQQLPEKYKEIFFDQSKNGYAGYIDGGASQEEFYKFIKPILEKMDGTEELLVKLNREDLLRKQRTFDNGSIPHQIHLGELHAILRRQEDFYPFLKDNREKIEKILTFRIPYYVGPLARGNSRFAWMTRKSEETITPWNFEEVVDKGASAQSFIERMTNFDKNLPNEKVLPKHSLLYEYFTVYNELTKVKYVTEGMRKPAFLSGEQKKAIVDLLFKTNRKVTVKQLKEDYFKKIECFDSVEISGVEDRFNASLGTYHDLLKIIKDKDFLDNEENEDILEDIVLTLTLFEDREMIEERLKTYAHLFDDKVMKQLKRRRYTGWGRLSRKLINGIRDKQSGKTILDFLKSDGFANRNFMQLIHDDSLTFKEDIQKAQVSGQGDSLHEHIANLAGSPAIKKGILQTVKVVDELVKVMGRHKPENIVIEMARENQTTQKGQKNSRERMKRIEEGIKELGSQILKEHPVENTQLQNEKLYLYYLQNGRDMYVDQELDINRLSDYDVDAIVPQSFLKDDSIDNKVLTRSDKNRGKSDNVPSEEVVKKMKNYWRQLLNAKLITQRKFDNLTKAERGGLSELDKAGFIKRQLVETRQITKHVAQILDSRMNTKYDENDKLIREVKVITLKSKLVSDFRKDFQFYKVREINNYHHAHDAYLNAVVGTALIKKYPKLESEFVYGDYKVYDVRKMIAKSEQEIGKATAKYFFYSNIMNFFKTEITLANGEIRKRPLIETNGETGEIVWDKGRDFATVRKVLSMPQVNIVKKTEVQTGGFSKESIRPK

SEQ ID NO: 1101 - protein, 5 aa, synthetic construct
  REGION 1..5: note = Description of Artificial Sequence: Synthetic peptide
RYADD

SEQ ID NO: 1102 - protein, 12 aa, synthetic construct
  REGION 1..12: note = Description of Artificial Sequence: Synthetic peptide
  MOD_RES 4..5: note = Any amino acid
  MOD_RES 7: note = Any amino acid
  MOD_RES 10..11: note = Any amino acid
YTRXXYXDDXXS
